(19) United States
(12) Patent Application Publication
(10) Pub. No.: US 2022/0112276 A1
(43) Pub. Date: Apr. 14, 2022

(54) BIOSYNTHETIC MATERIALS AND METHODS FOR MULTIDIRECTIONAL BIOTRANSPORTATION

(71) Applicant: JANSSEN BIOTECH, INC., Horsham, PA (US)

(72) Inventors: Paul B. HARVILLA, Nazareth, PA (US); Martin Jack BORROK, III, Chalfont, PA (US); Ninkka TAMOT, Colmar, PA (US)

(73) Assignee: JANSSEN BIOTECH, INC., Horsham, PA (US)

(21) Appl. No.: 17/498,418

(22) Filed: Oct. 11, 2021

Related U.S. Application Data
(60) Provisional application No. 63/090,654, filed on Oct. 12, 2020.
(60) Provisional application No. 63/090,651, filed on Oct. 12, 2020.
(60) Provisional application No. 63/090,647, filed on Oct. 12, 2020.

(51) Int. Cl. C07K 16/18; A61K 9/00; A61P 29/00; A61P 3/10; A61P 31/00; A61P 1/00; A61P 35/00

(52) U.S. Cl. CPC C07K 16/18; A61K 9/0073; A61K 9/0019; A61P 35/00; A61P 3/10; A61P 31/00; A61P 1/00; A61P 29/00

(57) ABSTRACT

Single domain antibodies that bind to pIgR are described. The single domain antibodies may compete with IgA binding to pIgR, or alternatively, the single domain antibodies may compete with IgA binding to pIgR. The single domain antibodies may be coupled to therapeutic agents so as to facilitate delivery of the therapeutic agent to the mucosal layer via pIgR-mediated transcytosis. The therapeutic agent can be, e.g., a small molecule or large molecule such as an antibody.

### CROSS-REFERENCE TO RELATED APPLICATIONS

[0001] This application claims the benefit of U.S. Ser. No. 63/090,647 filed Oct. 12, 2020; U.S. Ser. No. 63/090,651 filed Oct. 12, 2020; and U.S. Ser. No. 63/090,654, filed Oct. 12, 2020, the disclosure of each of which is incorporated by reference herein in its entirety.

### REFERENCE TO SEQUENCE LISTING SUBMITTED ELECTRONICALLY

[0002] This application contains a sequence listing, which is submitted electronically via EFS-Web as an ASCII formatted sequence listing with a file “14620-587-999_SL.txt” and a creation date of Sep. 30, 2021 and having a size of 650,045 bytes. The sequence listing submitted via EFS-Web is part of the specification and is herein incorporated by reference in its entirety.

### 1. FIELD

[0003] The present disclosure relates to materials and methods for delivery of agents to, into and across mucosal epithelial cells. The materials and methods may be effective to deliver agents, including small molecules and proteins, such as antibodies or fragments thereof, from systemic circulation to the mucosa or epithelial cells. The materials and methods may also be effective to deliver agents, including peptides, antibodies or fragments thereof, and vaccines to systemic circulation or lamina propria.

### 2. BACKGROUND

[0004] Targeted delivery of diagnostics and therapeutics can overcome several issues in drug delivery, such as systemic toxicity, circulation, cell barriers, bioavailability, targeted and controlled release, PK and clearance. Targeted delivery of molecules to highly compartmentalized organs by preferred routes of administration may be highly beneficial.

[0005] The human mucosa forms an elaborate extracellular environment, in which the immune system mediates host interactions with commensal and pathogenic agents. Mucosal protection is largely conferred through the function of polymeric immunoglobulin receptor (pIgR), the oldest identifiable Fc receptor. pIgR transports soluble polymeric forms of IgA and IgM into apical mucosal tissues from the basolateral side of the epithelium. pIgR expression is under the strong regulation of cytokines, hormones and pathogenic stimuli. It is upregulated during infection and inflammation.

[0006] Biologics have been the driving force in pharmaceutical space with increasing potential to address many diseases, disorders, and conditions, including chronic diseases and various unmet medical needs. Indeed, the number of biologics in development continues to increase exponentially, particularly in the therapeutic areas of cancer and cancer related conditions, rare diseases, neurologic disorders, and immunological or inflammatory diseases, disorders, and conditions, including autoimmune disorders.

[0007] However, delivery of biologics is challenging, partially due to their molecular weights and complexity. Whereas the molecular weight of synthesized small molecule drugs ranges in the few hundred to perhaps a few thousand Daltons (Da), the molecular weight of biologics can reach upward of 150,000 Da. Their relatively large size limits their transport across the epithelium, including transport through the mucosal epithelial barrier, and there are transport challenges for biologics to get to and through the mucosa. Consequently, the most prevalent mode of administration is invasive administration very often requiring the services of a health professional in a costly healthcare setting. Thus, there is need in art for effective drug administration methods particularly for biologics via less-invasive or non-invasive routes such as oral delivery, buccal delivery, nasal delivery or inhalation delivery.

### 3. SUMMARY

[0008] In one aspect, provided herein is a single domain antibody that binds to an extracellular domain of pIgR. In some embodiments, the single domain antibody binds to an extracellular domain 1 of pIgR. In some embodiments, the single domain antibody binds to an extracellular domain 2 of pIgR. In some embodiments, the single domain antibody binds to an extracellular domain 1-2 of pIgR. In some embodiments, the single domain antibody binds to an extracellular domain 3 of pIgR. In some embodiments, the single domain antibody binds to an extracellular domain 2-3 of pIgR. In some embodiments, the single domain antibody binds to an extracellular domain 4-5 of pIgR. In some embodiments, the single domain antibody binds to an extracellular domain 5 of pIgR. In some embodiments, the pIgR is human pIgR. In some embodiments, the pIgR is mouse pIgR. In some embodiments, the single domain antibody does not detectably bind to the amino acid sequence of EKAVADTRDQADGSRASVDSGSSEEQGGSSR (SEQ ID NO: 1964), EREIQNVGDQAQENRASGDAGSADGQSRSSSSK (SEQ ID NO: 1965) or EREIQNVRDQAQENRASGDAGSADGQSRSSSSK (SEQ ID NO: 1966). In some embodiments, the single domain antibody competes with IgA binding to the pIgR. In some embodiments, the single domain antibody promotes IgA binding to the pIgR. In some embodiments, the K_{D} of the binding of the single domain antibody to pIgR is from about 4 to about 525 nM. In some embodiments, the K_{D} of the binding of the single domain antibody to pIgR is less than about 50 nM. In some embodiments, the K_{D} of the binding of the single domain antibody to pIgR is from about 4 to about 34 nM. In some embodiments, the Tₘ of the single domain antibody is from about 36 to about 53° C. In some embodiments, the Tₘ of the single domain antibody is from about 53 to about 77° C. In some embodiments, the Tₘ of the single domain antibody is from 53.9 to 76.4° C.

[0009] In some embodiments, the single domain antibody comprises a CDR1 sequence set forth in any of SEQ ID NOs: 1 to 122. In some embodiments, the single domain antibody comprises a CDR2 sequence set forth in any of SEQ ID NOs: 1 to 122. In some embodiments, the single domain antibody comprises a CDR3 sequence set forth in any of SEQ ID NOs: 1 to 122. In some embodiments, the single domain antibody comprises a CDR1 sequence, a CDR2 sequence, and a CDR3 sequence present in any of SEQ ID NOs: 1 to 122.

[0010] In some embodiments, the single domain antibody comprises a framework derived from the framework of any of the single domain antibodies comprising the sequences of SEQ ID NOs: 1 to 122. In some embodiments, the single domain antibody comprises a framework comprising sequence having at least 75%, 80%, 85%, 90%, 95%, 96%, 97%, 98%, 99%, or 100% sequence identity with any of the sequences of SEQ ID NOs: 1 to 122.

[0011] In some embodiments, the single domain antibody is comprised of a sequence having at least 75%, 80%, 85%, 90%, 95%, 96%, 97%, 98%, 99%, or 100% sequence identity with any of the sequences of SEQ ID NOs: 1 to 122.

[0012] In another aspect is provided an isolated nucleic acid molecule encoding any of the above VHH domains.

[0013] In another aspect is provided an isolated nucleic acid molecule encoding the single domain antibody having a sequence with at least 85%, 90%, 95%, 96%, 97%, 98%, 99% or 100% sequence identity to any of the sequences of SEQ ID NOs: 1 to 122.

[0014] In another aspect is provided an vector comprising any of the above nucleic acid molecules. In another aspect is provided a cell expressing any of the above nucleic acid molecules.

[0015] In another aspect is provided a pharmaceutical composition comprising any of the above VHH domains and a pharmaceutically acceptable excipient. In another aspect is provided a pharmaceutical composition comprising a means for delivering a molecule in systemic circulation in a subject, and a pharmaceutically acceptable carrier. In another aspect is provided a pharmaceutical composition comprising a means for delivering a molecule into lamina propria of a subject, and a pharmaceutically acceptable carrier. In another aspect is provided a pharmaceutical composition comprising a means for delivering a molecule to a mucosal lumen of a subject, and a pharmaceutically acceptable carrier. In another aspect is provided a pharmaceutical composition comprising a means for delivering a molecule to an organ of a subject, and a pharmaceutically acceptable carrier. In another aspect is provided a pharmaceutical composition comprising a means for delivering a molecule to a pIgR-expressing cell, and a pharmaceutically acceptable carrier. In various embodiments of these aspects, the molecule is an antibody or fragment thereof, a peptide, a vaccine, a small molecule, a polynucleotide, a molecule comprising a radioactive isotope, a toxin, an enzyme, an anticoagulant, a hormone, a cytokine, an anti-inflammatory molecule, an RNAi, an mRNA, a self-replicating RNA, an antibiotic, or an antibody-antibiotic conjugate.

[0016] In another aspect, provided herein is a therapeutic molecule comprising an agent and a single domain antibody that binds to an extracellular domain of pIgR provided herein.

[0017] In some embodiments, the agent is an antibody or fragment thereof, a peptide, a vaccine, a small molecule, a polynucleotide, a radioisotope, a toxin, an enzyme, an anticoagulant, a hormone, a cytokine, an anti-inflammatory molecule, an RNAi, an mRNA, a self-replicating RNA, an antibiotic, or an antibody-antibiotic conjugate. In some embodiments, the agent is an antibiotic. In some embodiments, the single domain antibody is genetically fused or chemically conjugated to the agent. In some embodiments, the therapeutic molecule further comprises a linker between the single domain antibody and the agent. The linker may be a polypeptide. The linker may be a flexible linker comprising a sequence selected from the group consisting of EPKTPKPQPQPQLQPQPNPTTESKSPK (SEQ ID NO: 1978), (EAAAK)n (SEQ ID NO: 1967), (GGGGS)n (SEQ ID NO: 1968) and (GGGS)n (SEQ ID NO: 1969), wherein n is an integer from 1 to 20. In some embodiments, the single domain antibody is chemically-conjugated to the agent. In some embodiments, the single domain antibody is non-covalently bound to the agent.

[0018] In another aspect is provided a pharmaceutical composition comprising any of the above therapeutic molecules and a pharmaceutically acceptable carrier.

[0019] In another aspect is provided a method of delivering a therapeutic molecule to a mucosal lumen of a subject, the method comprising administering to the subject an effective amount of any of the above therapeutic molecules. In some embodiments, the therapeutic molecule is delivered to the mucosal lumen via forward transcytosis from the basolateral surface of a mucosal epithelial cell to the apical surface of the mucosal epithelial cell. In some embodiments, the mucosal epithelial cell is at or adjacent to the mucosal lumen. In some embodiments, the mucosal lumen is in the lung or in the gastrointestinal tract of the subject. In some embodiments, the mucosal epithelial cell is a cancer cell (e.g., a lung cancer cell, an esophageal cancer cell, a stomach cancer cell, a duodenal cancer cell, a liver cancer cell, a bladder cancer cell, a sinus cancer cell, a nasal cavity cancer cell, an endometrial cancer cell or a colorectal cancer cell.) In some embodiments, the cell is in a subject.

[0020] In another aspect is provided a method of delivering a therapeutic molecule to an organ of a subject, the method comprising administering to the subject any of the above therapeutic molecules. In some embodiments, the organ is selected from the group consisting of gastrointestinal track, small intestine, large intestine, stomach, esophagus, salivary gland, lung, vagina, uterus, and lacrimal gland. In some embodiments, the organ is a lung. In some embodiments, the agent is an antibody or fragment thereof, a peptide, a vaccine, a small molecule, a polynucleotide, a molecule comprising a radioactive isotope, a toxin, an enzyme, an anticoagulant, a hormone, a cytokine, an anti-inflammatory molecule, an RNAi, an antibiotic, or an antibody-antibiotic conjugate. In some embodiments, the agent is an antibiotic (e.g., a macrolide antibiotic, a fluoroquinolone, a tetracycline, amoxicillin, ceftriaxone, penicillin G, linezolid, moxifloxacin, and azithromycin.) In various embodiments, the therapeutic molecule is administered to the bloodstream of the subject. In some embodiments, the molecule is administered intravenously or subcutaneously.

[0021] In another aspect is provided a method of delivering a therapeutic molecule into systemic circulation in a subject, the method comprising administering to the subject the therapeutic molecule of any of the above. In some embodiments, the therapeutic molecule is delivered into the systemic circulation via reverse transcytosis from the apical surface of an epithelial cell to the basolateral surface of the epithelial cell. In some embodiments, the therapeutic molecule is delivered by oral delivery, buccal delivery, nasal delivery or inhalation delivery. In some embodiments, the agent is a peptide, an antibody or fragment thereof or a vaccine.

[0022] In another aspect is provided a method of delivering a therapeutic molecule into lamina propria of a subject, the method comprising administering to the subject the therapeutic molecule of any of the above. In some embodiments, the therapeutic molecule is delivered into the lamina propria via reverse transcytosis from the apical surface of an epithelial cell to the basolateral surface of the epithelial cell. In some embodiments, the therapeutic molecule is delivered by oral delivery or buccal delivery. In some embodiments, the agent is a peptide or an antibody or fragment thereof.

[0023] In another aspect is provided a method of increasing the rate of pIgR-mediated transcytosis across an epithelial cell comprising contacting the cell with (i) a single domain antibody that binds to an extracellular domain 1, an extracellular domain 2, an extracellular domain 1-2, an extracellular domain 3, an extracellular domain 2-3, an extracellular domain 4-5, or an extracellular domain 5 of pIgR or (ii) a therapeutic molecule comprising an agent and the VHH domain. In some embodiments, the transcytosis is forward transcytosis. In some embodiments, the transcytosis is reverse transcytosis.

[0024] In another aspect is provided a method of modulating a function of pIgR in a cell comprising contacting the cell with an effective amount of (i) a single domain antibody that binds to an extracellular domain 1, an extracellular domain 2, an extracellular domain 1-2, an extracellular domain 3, an extracellular domain 2-3, an extracellular domain 4-5, or an extracellular domain 5 of pIgR or (ii) a therapeutic molecule comprising an agent and the VHH domain. In some embodiments, the modulating the function of pIgR in the cell is activating said function of pIgR in said cell. In some embodiments, the modulating the function of pIgR in the cell is inhibiting said function of pIgR in said cell.

[0025] In another aspect is provided a method of delivery to a pIgR-expressing cell comprising contacting the cell with a single domain antibody or a therapeutic molecule, wherein the single domain antibody binds to an extracellular domain 1, an extracellular domain 2, an extracellular domain 1-2, an extracellular domain 3, an extracellular domain 2-3, an extracellular domain 4-5, or an extracellular domain 5 of pIgR, and wherein the a therapeutic molecule comprises an agent and the VHH domain. In some embodiments, the method of delivery is oral delivery, buccal delivery, nasal delivery or inhalation delivery.

[0026] In some embodiments, a method described above comprises a single domain antibody that competes with IgA binding to the pIgR. In some embodiments, a method described above comprises a single domain antibody that promotes IgA binding to the pIgR. In some embodiments, the KD of the binding of the single domain antibody to pIgR is from about 4 to about 525 nM. In some embodiments, the KD of the binding of the single domain antibody to pIgR is less than about 50 nM. In some embodiments, the KD of the binding of the single domain antibody to pIgR is from about 4 to about 34 nM. In some embodiments, the Tₘ of the single domain antibody is from about 36 to about 53° C. In some embodiments, the Tₘ of the single domain antibody is from about 53 to about 77° C. In some embodiments, the Tm of the single domain antibody is from 53.9 to 76.4° C.

[0027] In another aspect, provided herein is a method to diagnose a disease or condition, the method comprising administering to the subject (i) a single domain antibody that binds to an extracellular domain 1, an extracellular domain 2, an extracellular domain 1-2, an extracellular domain 3, an extracellular domain 2-3, an extracellular domain 4-5, or an extracellular domain 5 of pIgR, or (ii) a therapeutic molecule comprising an agent and the VHH domain, to the subject, the method comprising detecting the amount of single domain antibody in a tissue of the subject, wherein the tissue comprises a diseased cell, and comparing the amount of single domain antibody in the tissue of the subject with a reference amount of single domain antibody in the tissue of a comparable healthy subject. In some embodiments, the tissue comprises a mucosal cell. In some embodiments, the tissue comprises a mucosal lumen. In some embodiments, the single domain antibody competes with IgA binding to the pIgR. In some embodiments, the single domain antibody promotes IgA binding to the pIgR.

[0028] In some embodiments, a method described above comprises a VHH domain, wherein the KD of the binding of the single domain antibody to pIgR is from about 4 to about 525 nM. In some embodiments, the KD of the binding of the single domain antibody to pIgR is less than about 50 nM. In some embodiments, the KD of the binding of the single domain antibody to pIgR is from about 4 to about 34 nM. In some embodiments, the Tₘ of the single domain antibody is from about 36 to about 53° C. In some embodiments, the Tm of the single domain antibody is from about 53 to about 77° C. In some embodiments, the Tm of the single domain antibody is from 53.9 to 76.4° C.

[0029] In some embodiments, a method described above comprises a therapeutic molecule that comprises single domain antibody and an agent, wherein the agent is an antibody or fragment thereof, a peptide, a vaccine, a small molecule, a polynucleotide, a radioisotope, a toxin, an enzyme, an anticoagulant, a hormone, a cytokine, an anti-inflammatory molecule, an RNAi, an mRNA, a self-replicating RNA, an antibiotic, or an antibody-antibiotic conjugate. In some embodiments, the agent is an antibiotic. In some embodiments, the single domain antibody is genetically fused or chemically conjugated to the agent. In some embodiments, a linker is between the single domain antibody and the agent. In some embodiments, the linker is a polypeptide. In some embodiments, the linker is a flexible linker comprising a sequence selected from the group consisting of EPKTPKPQPQPQLQPQPNPTTESKSPK (SEQ ID NO: 1978), (EAAAK)n (SEQ ID NO: 1967), (GGGGS)n (SEQ ID NO: 1968) and (GGGS)n (SEQ ID NO: 1969), wherein n is an integer from 1 to 20.

[0030] In some embodiments, a method described above comprises a therapeutic molecule that comprises single domain antibody provided herein and an agent, wherein the single domain antibody is chemically-conjugated to the agent. In some embodiments, the single domain antibody is non-covalently bound to the agent. In some embodiments, the single domain antibody comprises a radioisotope. In some embodiments, the radioisotope is zirconium-89.

[0031] In various embodiments, a method to diagnose a disease or condition described above comprises a method wherein the disease is lung cancer, and wherein the tissue is lung. In various embodiments, the disease is endometrial cancer, and wherein the tissue is the uterus. In various embodiments, the disease is colon cancer, and wherein the tissue is the colon. In various embodiments, the disease is an inflammatory disease, and wherein the tissue is lamina propria. In some embodiments, the inflammatory disease is inflammatory bowel disease, Crohn's disease or ulcerative colitis. In various embodiments, the diseased cell expresses an antigen, and wherein the therapeutic molecule is coupled to an antibody that specifically recognizes the antigen. In various embodiments, the antigen is specific to the diseased cell.

[0032] In some embodiments, a method described above comprises a single domain antibody that binds to an extracellular domain of pIgR provided herein.

[0033] In some embodiments, a method described above comprises a therapeutic molecule that comprises single domain antibody provided herein and an agent, wherein the agent is an antibody or fragment thereof, a peptide, a vaccine, a small molecule, a polynucleotide, a radioisotope, a toxin, an enzyme, an anticoagulant, a hormone, a cytokine, an anti-inflammatory molecule, an RNAi, an mRNA, a self-replicating RNA, an antibiotic, or an antibody-antibiotic conjugate. In some embodiments, the agent is an antibiotic. In some embodiments, the single domain antibody is genetically fused or chemically conjugated to the agent. In some embodiments, the method further comprises a linker between the single domain antibody and the agent. In some embodiments, the linker is a polypeptide. In some embodiments, the linker is a flexible linker comprising a sequence selected from the group consisting of EPKTPKPQPQPQLQPQPNPTTESKSPK (SEQ ID NO: 1978), (EAAAK)n (SEQ ID NO: 1967), (GGGGS)n (SEQ ID NO: 1968) and (GGGS)n (SEQ ID NO: 1969), wherein n is an integer from 1 to 20. In some embodiments, the single domain antibody is chemically-conjugated to the agent. In some embodiments, the single domain antibody is non-covalently bound to the agent. In some embodiments, the method does not inhibit pIgR-mediated transcytosis of IgA.

[0034] In one aspect, provided herein is a method for delivering from an apical surface of a polymeric immunoglobulin receptor (pIgR)-expressing cell to a basolateral surface of the pIgR-expressing cell comprising contacting the pIgR-expressing cell with (i) a single domain antibody that binds to pIgR, or (ii) a therapeutic molecule comprising an agent and the single domain antibody.

[0035] In another aspect, provided herein is a method for transporting a therapeutic molecule to a basolateral surface of the pIgR-expressing cell of a subject, comprising administering to the subject the therapeutic molecule comprising an agent and a single domain antibody. In some embodiments, the therapeutic molecule is administered to the subject via oral delivery, buccal delivery, nasal delivery or inhalation delivery. In some embodiments, the therapeutic agent is transported from an apical surface of a pIgR-expressing cell to a basolateral surface of the pIgR-expressing cell in the subject.

[0036] In another aspect, provided herein is a method for transporting a therapeutic molecule to systemic circulation of a subject, comprising administering to the subject the therapeutic molecule comprising an agent and a single domain antibody, wherein the therapeutic molecule is administered to the subject via oral delivery, buccal delivery, nasal delivery or inhalation delivery. In some embodiments, the therapeutic agent is transported from an apical surface of a pIgR-expressing cell to a basolateral surface of the pIgR-expressing cell in the subject.

[0037] In yet another aspect, provided herein is a method for transporting a therapeutic molecule to lamina propria or gastrointestinal tract of a subject, comprising administering to the subject the therapeutic molecule comprising an agent and a single domain antibody, wherein the therapeutic molecule is administered to the subject via oral delivery, buccal delivery, nasal delivery or inhalation delivery. In some embodiments, the therapeutic agent is transported from an apical surface of a pIgR-expressing cell to a basolateral surface of the pIgR-expressing cell in the subject.

[0038] In some embodiments, the single domain antibody or the therapeutic molecule comprising the agent and the single domain antibody is capable of being transported from the basolateral surface of the pIgR-expressing cell to the apical surface of the pIgR-expressing cell.

[0039] In some embodiments, the pIgR-expressing cell is an epithelial cell. In some embodiments, the epithelia cell is an intestinal lumen cell or an airway epithelial cell.

[0040] In some embodiments, the agent is a diabetes medication. In some embodiments, the diabetes medication is selected from a group consisting of insulin, glucagon-like-peptide-1, insulin-mimic peptides, and glucagon-like-peptide-1-mimic peptides.

[0041] In some embodiments, the agent is a peptide or an antibody or a fragment thereof. In some embodiments, the antibody or fragment thereof is selected from a group consisting of an anti-TNF-alpha antibody or a fragment thereof, an anti-IL23 antibody or a fragment thereof, and an antibody that binds to a receptor of IL23 or a fragment thereof.

[0042] In some embodiments, the agent is a vaccine. In some embodiments, the vaccine is for preventing an infection selected from a group consisting of Vibrio, Cholera, Typhoid, Rotavirus, Tuberculosis, HIV, Flu, Ebola, and Sendai.

[0043] In another aspect, provide herein is a process for providing a molecule to a subject, comprising administering to the subject the molecule comprising an agent and a single domain antibody that binds to polymeric immunoglobulin receptor (pIgR), wherein the molecule is administered to the subject via oral delivery, buccal delivery, nasal delivery or inhalation delivery.

[0044] In some embodiments, the molecule is capable of being provided to a basolateral surface of an pIgR-expressing cell from an apical surface of the pIgR-expressing cell in the subject.

[0045] In some embodiments, the molecule is capable of being provided to an apical surface of the pIgR-expressing cell from a basolateral surface of an pIgR-expressing cell in the subject.

[0046] In some embodiments, the pIgR-expressing cell is an epithelial cell. In some embodiments, the epithelia cell is an intestinal lumen cell or an airway epithelial cell.

[0047] In some embodiments, the agent is a diabetes medication. In some embodiments, the diabetes medication is selected from a group consisting of insulin, glucagon-like-peptide-1, insulin-mimic peptides, and glucagon-like-peptide-1-mimic peptides.

[0048] In some embodiments, the agent is a peptide or an antibody or a fragment thereof. In some embodiments, the antibody or fragment thereof is selected from a group consisting of an anti-TNF-alpha antibody or a fragment thereof, an anti-IL23 antibody or a fragment thereof, and an antibody that binds to a receptor of IL23 or a fragment thereof.

[0049] In some embodiments, the agent is a vaccine. In some embodiments, the vaccine is for preventing an infection selected from a group consisting of Vibrio, Cholera, Typhoid, Rotavirus, Tuberculosis, HIV, Flu, Ebola, and Sendai.

[0050] In another aspect, provided herein is a process comprising steps for providing a molecule to a subject.

[0051] In some embodiments, the molecule comprises an agent and a single domain antibody that binds to pIgR.

[0052] In some embodiments, the agent is an antibody or fragment thereof, a peptide, a vaccine, a small molecule, a polynucleotide, a radioisotope, a toxin, an enzyme, an anticoagulant, a hormone, a cytokine, an anti-inflammatory molecule, an RNAi, an antibiotic, or an antibody-antibiotic conjugate.

[0053] In some embodiments, the agent is an antibody or fragment thereof, a peptide, or a vaccine.

[0054] In some embodiments, the single domain antibody is genetically fused or chemically conjugated to the agent.

[0055] In one aspect, provided herein is a system for providing a molecule to lamina propria or gastrointestinal tract of a subject, comprising a molecule suitable for administering to the subject, the molecule comprising an agent and a single domain antibody that binds to pIgR, wherein the molecule is administered to the subject via oral delivery, buccal delivery, nasal delivery or inhalation delivery, or a combination thereof.

[0056] In some embodiments, the agent is a diabetes medication. In some embodiments, the diabetes medication is selected from a group consisting of insulin, glucagon-like-peptide-1, insulin-mimic peptides, and glucagon-like-peptide-1-mimic peptides.

[0057] In some embodiments, the agent is a peptide or an antibody or a fragment thereof. In some embodiments, the antibody or fragment thereof is selected from a group consisting of an anti-TNF-alpha antibody or a fragment thereof, an anti-IL23 antibody or a fragment thereof, and an antibody that binds to a receptor of IL23 or a fragment thereof.

[0058] In some embodiments, the agent is a vaccine. In some embodiments, the vaccine is for preventing an infection selected from a group consisting of Vibrio, Cholera, Typhoid, Rotavirus, Tuberculosis, HIV, Flu, Ebola, and Sendai.

[0059] In another aspect, provided herein is a system comprising a means for providing a molecule to lamina propria or gastrointestinal tract of a subject.

[0060] In some embodiments, the molecule comprises an agent and a single domain antibody that binds to pIgR.

[0061] In some embodiments, the agent is an antibody or fragment thereof, a peptide, a vaccine, a small molecule, a polynucleotide, a radioisotope, a toxin, an enzyme, an anticoagulant, a hormone, a cytokine, an anti-inflammatory molecule, an RNAi, an antibiotic, or an antibody-antibiotic conjugate.

[0062] In some embodiments, the agent is an antibody or fragment thereof, a peptide, or a vaccine.

[0063] In some embodiments, the single domain antibody is genetically fused or chemically conjugated to the agent.

[0064] In some embodiments, the single domain antibody binds to an extracellular domain 1, an extracellular domain 2, an extracellular domain 1-2, an extracellular domain 3, an extracellular domain 2-3, an extracellular domain 4-5, or an extracellular domain 5 of pIgR.

[0065] In some embodiments, the single domain antibody binds to an extracellular domain 1 of pIgR. In some embodiments, the single domain antibody binds to an extracellular domain 2 of pIgR. In some embodiments, the single domain antibody binds to an extracellular domain 1-2 of pIgR. In some embodiments, the single domain antibody binds to an extracellular domain 3 of pIgR. In some embodiments, the single domain antibody binds to an extracellular domain 2-3 of pIgR. In some embodiments, the single domain antibody binds to an extracellular domain 4-5 of pIgR. In some embodiments, the single domain antibody binds to an extracellular domain 5 of pIgR.

[0066] In some embodiments, the single domain antibody competes with IgA binding to the pIgR. In some embodiments, the single domain antibody promotes IgA binding to the pIgR.

[0067] In some embodiments, the K_{D} of the binding of the single domain antibody to pIgR is from about 4 to about 525 nM. In some embodiments, the K_{D} of the binding of the single domain antibody to pIgR is less than about 50 nM. In some embodiments, the K_{D} of the binding of the single domain antibody to pIgR is from about 4 to about 34 nM.

[0068] In some embodiments, the Tₘ of the single domain antibody is from about 36 to about 53° C. In some embodiments, the Tₘ of the single domain antibody is from about 53 to about 77° C. In other embodiments, the Tₘ of the single domain antibody is from 53.9 to 76.4° C.

[0069] In some embodiments, pIgR is human pIgR. In other embodiments, pIgR is mouse pIgR.

[0070] In some embodiments, the single domain antibody provided herein does not bind to a stalk sequence of human pIgR (e.g., SEQ ID NO:143 and/or a stalk sequence of mouse pIgR (e.g., SEQ ID NO:144 or SEQ ID NO:145).

[0071] In some embodiments, the single domain antibody comprises a CDR3 sequence set forth in any of SEQ ID NOs: 1 to 122.

[0072] In some embodiments, the single domain antibody comprises a CDR2 sequence set forth in any of SEQ ID NOs: 1 to 122.

[0073] In some embodiments, the single domain antibody comprises a CDR1 sequence set forth in any of SEQ ID NOs: 1 to 122.

[0074] In some embodiments, the single domain antibody provided herein comprises a CDR1 sequence, a CDR2 sequence, and a CDR3 sequence of the single domain antibody comprising an amino acid sequence selected from SEQ ID NOs: 1 to 122.

[0075] In some embodiments, the single domain antibody comprises a framework derived from the framework of any of the single domain antibodies comprising the sequences of SEQ ID NOs: 1 to 122.

[0076] In some embodiments, the single domain antibody comprises a framework comprising sequence having at least 75%, 80%, 85%, 90%, 95%, 96%, 97%, 98%, 99%, or 100% sequence identity with any of the sequences of SEQ ID NOs: 1 to 122.

[0077] In some embodiments, the single domain antibody is comprised of a sequence having at least 75%, 80%, 85%, 90%, 95%, 96%, 97%, 98%, 99%, or 100% sequence identity with any of the sequences of SEQ ID NOs: 1 to 122.

[0078] In some embodiments, the single domain antibody is genetically fused or chemically conjugated to the agent.

[0079] In some embodiments, the single domain antibody provided herein further comprises a linker between the single domain antibody and the agent. In some embodiments, the linker is a polypeptide. In some embodiments, the linker is a flexible linker comprising a sequence selected from the group consisting of EPKTPKPQPQPQLQPQPNPTTESKSPK (SEQ ID NO: 1978), (EAAAK)n (SEQ ID NO: 1967), (GGGGS)n (SEQ ID NO: 1968) and (GGGS)n (SEQ ID NO: 1969), wherein n is an integer from 1 to 20.

[0080] In some embodiments, the single domain antibody is chemically-conjugated to the agent. In other embodiments, the single domain antibody is non-covalently bound to the agent.

[0081] In some embodiments, the method provided herein does not inhibit pIgR-mediated transcytosis of IgA.

### 4. BRIEF DESCRIPTION OF THE FIGURES

[0082] The patent or application file contains at least one drawing executed in color. Copies of this patent or patent application publication with color drawing(s) will be provided by the Office upon request and payment of the necessary fee.

[0083] FIGS. 1A and 1B are schematics showing the pathway of pIgR-mediated bidirectional transcytosis. FIG. 1A shows that molecules binding to the secretory component (domains 1-5) of the pIgR ectodomain, such as dimeric IgA (natural ligand) or VHH (artificial pIgR ligand), can transcytose the epithelial cell from the basolateral to the apical direction and reach the mucosal lumen from blood. This secretory component-mediated forward transport can be used for delivering molecules to the mucosal lumen from systemic circulation. Described herein are VHH molecules that bind to the secretory component and transcytose from the basolateral to the apical side of the epithelium. FIG. 1B shows that molecules binding to the stalk region of the pIgR ectodomain (any artificial ligand) can transcytose the epithelial cell from the apical to the basolateral direction and reach the blood from mucosal lumen. This stalk-mediated reverse transport can be used for delivering molecules to systemic circulation following oral consumption.

[0084] FIG. 2A is a schematic showing the structure of pIgR.

[0085] FIG. 2B is a schematic showing a mechanism of pIgR-mediated transport, and adapted from Kaetzel, Curr. Biol., 2001, 11(1):R35-38.

[0086] FIG. 3 shows the expression of pIgR in various organs.

[0087] FIG. 4 shows the expression of hpIgR on MDCK cells. Staining shows hpIgR located on the surface and interior of the monolayer of MDCK cells. The distribution of hpIgR staining within the monolayer is not uniform. Initial experiments show hpIgR receptor density at about 6000 on the surface per cell. The blue color indicates Hoechst stain for nucleus, the green color indicates antibody staining, and the red indicates anti-Rab5 staining.

[0088] FIG. 5 depicts the EpiAirway human tissue model.

[0089] FIG. 6 shows that the EpiAirway tissue model is on a slanted membrane.

[0090] FIG. 7 illustrates a strategy for Opera Phenix imaging and analysis to overcome slanted tissue issues with EpiAirway tissue model.

[0091] FIG. 8 shows the crystal structure of unliganded hpIgR in an inactive conformation, and is adapted from Stadtmueller et al., Elife, Mar. 4, 2016, e10640.

[0092] FIG. 9 shows structure of pIgR:IgA complex by constrained scattering modeling, and is adapted from Bonner et al., J. Biol. Chem., 2009, 284(8):5077-87.

[0093] FIG. 10A shows a structural model for IgA transcytosis, and is adapted from Stadtmueller et al., Elife, Mar. 4, 2016, e10640.

[0094] FIG. 10B shows a schematic of pIgR-mediated dimeric IgA transport across the mucosal epithelial barrier. (1) IgA production by plasma cells and IgA dimerization; (2) Binding of dimeric IgA (dIgA) to pIgR ECD on the basolateral side of the epithelium (pIgR-dIgA interactions are mediated by domains 1 and 5 of pIgR and Fc and J chains of dIgA); (3) pIgR-mediated transcytosis of dimeric IgA (clathrin-mediated endocytosis drives the basolateral to apical transport, and upon reaching the apical side, pIgR ECD is proteolytically cleaved and released into mucus along with IgA. Mucosal IgA in complex with secreted pIgR ECD (secretory component) is termed as secretory IgA (sIgA)); and (4) Neutralization of mucosal antigens by sIgA.

[0095] FIG. 11A illustrates structure of domains of hpIgR and shows that D1 is necessary for IgA binding to hpIgR. The figure is adapted from Stadtmueller et al., Elife, Mar. 4, 2016, e10640.

[0096] FIG. 11B shows the structure of secretory IgA1 (sIgA1), the complex between dimeric IgA and secretory component, obtained by constrained modelling of solution scattering and AUC information (created from PDB ID 3CHN). Heavy chain is shown in orange, light chain is shown in green, J chain is shown in pink and secretory component is shown in teal. The figure is adapted from Bonner et al., Mucosal Immunol., 2:74-84 (2009).

### 5. DETAILED DESCRIPTION

[0097] The present disclosure is based in part on the surprising finding that single domain antibodies (e.g., VHH domains) that bind to pIgR as provided herein are capable of transporting or facilitating to transport agents from an apical surface of a polymeric immunoglobulin receptor (pIgR)-expressing cell to a basolateral surface of the pIgR-expressing cell, and thus provide an effective method for administering therapeutic molecules (including diagnostic molecules), e.g., to systemic circulation or lamina propria or gastrointestinal tract of a subject, via, e.g., oral delivery, buccal delivery, nasal delivery or inhalation delivery.

### 5.1. Definitions

[0098] Techniques and procedures described or referenced herein include those that are generally well understood and/or commonly employed using conventional methodology by those skilled in the art, such as, for example, the widely utilized methodologies described in Sambrook et al., Molecular Cloning: A Laboratory Manual (3d ed. 2001); Current Protocols in Molecular Biology (Ausubel et al. eds., 2003); Therapeutic Monoclonal Antibodies: From Bench to Clinic (An ed. 2009); Monoclonal Antibodies: Methods and Protocols (Albitar ed. 2010); and Antibody Engineering Vols 1 and 2 (Kontermann and Dübel eds., 2d ed. 2010).

[0099] Unless otherwise defined herein, technical and scientific terms used in the present description have the meanings that are commonly understood by those of ordinary skill in the art. For purposes of interpreting this specification, the following description of terms will apply and whenever appropriate, terms used in the singular will also include the plural and vice versa. In the event that any description of a term set forth conflicts with any document incorporated herein by reference, the description of the term set forth below shall control.

[0100] The term “antibody,” “immunoglobulin,” or “Ig” is used interchangeably herein, and is used in the broadest sense and specifically covers, for example, monoclonal antibodies (including agonist, antagonist, neutralizing antibodies, full length or intact monoclonal antibodies), antibody compositions with polyepitopic or monoepitopic specificity, polyclonal or monovalent antibodies, multivalent antibodies, multispecific antibodies (e.g., bispecific antibodies so long as they exhibit the desired biological activity), formed from at least two intact antibodies, single chain antibodies, and fragments thereof, as described below. An antibody can be human, humanized, chimeric and/or affinity matured, as well as an antibody from other species, for example, mouse and rabbit, etc. The term “antibody” is intended to include a polypeptide product of B cells within the immunoglobulin class of polypeptides that is able to bind to a specific molecular antigen and is composed of two identical pairs of polypeptide chains, wherein each pair has one heavy chain (about 50-70 kDa) and one light chain (about 25 kDa), each amino-terminal portion of each chain includes a variable region of about 100 to about 130 or more amino acids, and each carboxy-terminal portion of each chain includes a constant region. See, e.g., Antibody Engineering (Borrebaeck ed., 2d ed. 1995); and Kuby, Immunology (3d ed. 1997). In specific embodiments, the specific molecular antigen can be bound by an antibody provided herein, including a polypeptide or an epitope. Antibodies also include, but are not limited to, synthetic antibodies, recombinantly produced antibodies, single domain antibodies including from Camelidae species (e.g., llama or alpaca) or their humanized variants, intrabodies, anti-idiotypic (anti-Id) antibodies, and functional fragments (e.g., antigen-binding fragments) of any of the above, which refers to a portion of an antibody heavy or light chain polypeptide that retains some or all of the binding activity of the antibody from which the fragment was derived. Non-limiting examples of functional fragments (e.g., antigen-binding fragments) include single-chain Fvs (scFv) (e.g., including monospecific, bispecific, etc.), Fab fragments, F(ab′) fragments, F(ab)₂ fragments, F(ab′)2 fragments, disulfide-linked Fvs (dsFv), Fd fragments, Fv fragments, diabody, triabody, tetrabody, and minibody. In particular, antibodies provided herein include immunoglobulin molecules and immunologically active portions of immunoglobulin molecules, for example, antigen-binding domains or molecules that contain an antigen-binding site that binds to an antigen (e.g., one or more CDRs of an antibody). Such antibody fragments can be found in, for example, Harlow and Lane, Antibodies: A Laboratory Manual (1989); Mol. Biology and Biotechnology: A Comprehensive Desk Reference (Myers ed., 1995); Huston et al., 1993, Cell Biophysics 22:189-224; Pluckthun and Skerra, 1989, Meth. Enzymol. 178:497-515; and Day, Advanced Immunochemistry (2d ed. 1990). The antibodies provided herein can be of any class (e.g., IgG, IgE, IgM, IgD, and IgA) or any subclass (e.g., IgG1, IgG2, IgG3, IgG4, IgA1, and IgA2) of immunoglobulin molecule. Antibodies may be agonistic antibodies or antagonistic antibodies. Antibodies may be neither agonistic nor antagonistic.

[0101] An “antigen” is a structure to which an antibody can selectively bind. A target antigen may be a polypeptide, carbohydrate, nucleic acid, lipid, hapten, or other naturally occurring or synthetic compound. In some embodiments, the target antigen is a polypeptide. In certain embodiments, an antigen is associated with a cell, for example, is present on or in a cell.

[0102] An “intact” antibody is one comprising an antigen-binding site as well as a CL and at least heavy chain constant regions, CH1, CH2 and CH3. The constant regions may include human constant regions or amino acid sequence variants thereof. In certain embodiments, an intact antibody has one or more effector functions.

[0103] The terms “antigen-binding fragment,” “antigen-binding domain,” “antigen-binding region,” and similar terms refer to that portion of a binding molecule, which comprises the amino acid residues that interact with an antigen and confer on the binding agent its specificity and affinity for the antigen (e.g., the CDRs). “Antigen-binding fragment” as used herein include “antibody fragment,” which comprise a portion of an intact antibody, such as the antigen-binding or variable region of the intact antibody. Examples of antibody fragments include, without limitation, Fab, Fab′, F(ab′)2, and Fv fragments; diabodies and di-diabodies (see, e.g., Holliger et al., 1993, Proc. Natl. Acad. Sci. 90:6444-48; Lu et al., 2005, J. Biol. Chem. 280:19665-72; Hudson et al., 2003, Nat. Med. 9:129-34; WO 93/11161; and U.S. Pat. Nos. 5,837,242 and 6,492,123); single-chain antibody molecules (see, e.g., U.S. Pat. Nos. 4,946,778; 5,260,203; 5,482,858; and 5,476,786); dual variable domain antibodies (see, e.g., U.S. Pat. No. 7,612,181); single variable domain antibodies (sdAbs) (see, e.g., Woolven et al., 1999, Immunogenetics 50: 98-101; and Streltsov et al., 2004, Proc Natl Acad Sci USA. 101:12444-49); and multispecific antibodies formed from antibody fragments.

[0104] “Single domain antibody” or “sdAb” as used herein refers to a single monomeric variable antibody domain and which is capable of antigen binding (e.g., single domain antibodies that bind to pIgR). Single domain antibodies include VHH domains as described herein. Examples of single domain antibodies include, but are not limited to, antibodies naturally devoid of light chains such as those from Camelidae species (e.g., llama), single domain antibodies derived from conventional 4-chain antibodies, engineered antibodies and single domain scaffolds other than those derived from antibodies. Single domain antibodies may be derived from any species including, but not limited to mouse, human, camel, llama, goat, rabbit, and bovine. For example, a single domain antibody can be derived from antibodies raised in Camelidae species, for example in camel, llama, dromedary, alpaca and guanaco, as described herein. Other species besides Camelidae may produce heavy chain antibodies naturally devoid of light chain; VHHs derived from such other species are within the scope of the disclosure. In some embodiments, the single domain antibody (e.g., VHH) provided herein has a structure of FR1-CDR1-FR2-CDR2-FR3-CDR3-FR4. Single domain antibodies may be genetically fused or chemically conjugated to another molecule (e.g., an agent) as described herein.

[0105] The terms “binds” or “binding” refer to an interaction between molecules including, for example, to form a complex. Interactions can be, for example, non-covalent interactions including hydrogen bonds, ionic bonds, hydrophobic interactions, and/or van der Waals interactions. A complex can also include the binding of two or more molecules held together by covalent or non-covalent bonds, interactions, or forces. The strength of the total non-covalent interactions between a single antigen-binding site on an antibody and a single epitope of a target molecule, such as an antigen, is the affinity of the antibody or functional fragment for that epitope. The ratio of dissociation rate (k_{off}) to association rate (kₒₙ) of a binding molecule (e.g., an antibody) to a monovalent antigen (k_{off}/kₒₙ) is the dissociation constant K_{D}, which is inversely related to affinity. The lower the K_{D} value, the higher the affinity of the antibody. The value of K_{D} varies for different complexes of antibody and antigen and depends on both kₒₙ and k_{off}. The dissociation constant K_{D} for an antibody provided herein can be determined using any method provided herein or any other method well known to those skilled in the art. The affinity at one binding site does not always reflect the true strength of the interaction between an antibody and an antigen. When complex antigens containing multiple, repeating antigenic determinants, such as a polyvalent antigen, come in contact with antibodies containing multiple binding sites, the interaction of antibody with antigen at one site will increase the probability of a reaction at a second site. The strength of such multiple interactions between a multivalent antibody and antigen is called the avidity.

[0106] In connection with the binding molecules described herein terms such as “bind to,” “that specifically bind to,” and analogous terms are also used interchangeably herein and refer to binding molecules of antigen binding domains that specifically bind to an antigen, such as a polypeptide. A binding molecule or antigen binding domain that binds to or specifically binds to an antigen may be cross-reactive with related antigens. In certain embodiments, a binding molecule or antigen binding domain that binds to or specifically binds to an antigen does not cross-react with other antigens. A binding molecule or antigen binding domain that binds to or specifically binds to an antigen can be identified, for example, by immunoassays, Octet®, Biacore®, or other techniques known to those of skill in the art. In some embodiments, a binding molecule or antigen binding domain binds to or specifically binds to an antigen when it binds to an antigen with higher affinity than to any cross-reactive antigen as determined using experimental techniques, such as radioimmunoassays (RIA) and enzyme linked immunosorbent assays (ELISAs). Typically a specific or selective reaction will be at least twice background signal or noise and may be more than 10 times background. See, e.g., Fundamental Immunology 332-36 (Paul ed., 2d ed. 1989) for a discussion regarding binding specificity. In certain embodiments, the extent of binding of a binding molecule or antigen binding domain to a “non-target” protein is less than about 10% of the binding of the binding molecule or antigen binding domain to its particular target antigen, for example, as determined by fluorescence activated cell sorting (FACS) analysis or RIA. With regard terms such as “specific binding,” “specifically binds to,” or “is specific for” means binding that is measurably different from a non-specific interaction. Specific binding can be measured, for example, by determining binding of a molecule compared to binding of a control molecule, which generally is a molecule of similar structure that does not have binding activity. For example, specific binding can be determined by competition with a control molecule that is similar to the target, for example, an excess of non-labeled target. In this case, specific binding is indicated if the binding of the labeled target to a probe is competitively inhibited by excess unlabeled target. A binding molecule or antigen binding domain that binds to an antigen includes one that is capable of binding the antigen with sufficient affinity such that the binding molecule is useful, for example, as a diagnostic agent in targeting the antigen. In certain embodiments, a binding molecule or antigen binding domain that binds to an antigen has a dissociation constant (K_{D}) of less than or equal to 800 nM, 600 nM, 550 nM, 500 nM, 300 nM, 250 nM, 100 nM, 50 nM, 10 nM, 5 nM, 4 nM, 3 nM, 2 nM, 1 nM, 0.9 nM, 0.8 nM, 0.7 nM, 0.6 nM, 0.5 nM, 0.4 nM, 0.3 nM, 0.2 nM, or 0.1 nM. In certain embodiments, a binding molecule or antigen binding domain binds to an epitope of an antigen that is conserved among the antigen from different species (e.g., between human and cyno species).

[0107] “Binding affinity” generally refers to the strength of the sum total of noncovalent interactions between a single binding site of a molecule (e.g., a binding protein such as an antibody) and its binding partner (e.g., an antigen). Unless indicated otherwise, as used herein, “binding affinity” refers to intrinsic binding affinity which reflects a 1:1 interaction between members of a binding pair (e.g., antibody and antigen). The affinity of a binding molecule X for its binding partner Y can generally be represented by the dissociation constant (K_{D}). Affinity can be measured by common methods known in the art, including those described herein. Low-affinity antibodies generally bind antigen slowly and tend to dissociate readily, whereas high-affinity antibodies generally bind antigen faster and tend to remain bound longer. A variety of methods of measuring binding affinity are known in the art, any of which can be used for purposes of the present disclosure. Specific illustrative embodiments include the following. In one embodiment, the “K_{D}” or “K_{D} value” may be measured by assays known in the art, for example by a binding assay. The K_{D} may be measured in a RIA, for example, performed with the Fab version of an antibody of interest and its antigen (Chen et al., 1999, J. Mol Biol 293:865-81). The K_{D} or K_{D} value may also be measured by using biolayer interferometry (BLI) or surface plasmon resonance (SPR) assays by Octet®, using, for example, an Octet®Red96 system, or by Biacore®, using, for example, a Biacore®TM-2000 or a Biacore®TM-3000. An “on-rate” or “rate of association” or “association rate” or “kon” may also be determined with the same biolayer interferometry (BLI) or surface plasmon resonance (SPR) techniques described above using, for example, the Octet®Red96, the Biacore®TM-2000, or the Biacore®TM-3000 system.

[0108] In certain embodiments, the binding molecules or antigen binding domains can comprise “chimeric” sequences in which a portion of the heavy and/or light chain is identical with or homologous to corresponding sequences in antibodies derived from a particular species or belonging to a particular antibody class or subclass, while the remainder of the chain(s) is identical with or homologous to corresponding sequences in antibodies derived from another species or belonging to another antibody class or subclass, as well as fragments of such antibodies, so long as they exhibit the desired biological activity (see U.S. Pat. No. 4,816,567; and Morrison et al., 1984, Proc. Natl. Acad. Sci. USA 81:6851-55). Chimeric sequences may include humanized sequences.

[0109] In certain embodiments, the binding molecules or antigen binding domains can comprise portions of “humanized” forms of nonhuman (e.g., camelid, murine, non-human primate) antibodies that include sequences from human immunoglobulins (e.g., recipient antibody) in which the native CDR residues are replaced by residues from the corresponding CDR of a nonhuman species (e.g., donor antibody) such as camelid, mouse, rat, rabbit, or nonhuman primate having the desired specificity, affinity, and capacity. In some instances, one or more FR region residues of the human immunoglobulin sequences are replaced by corresponding nonhuman residues. Furthermore, humanized antibodies can comprise residues that are not found in the recipient antibody or in the donor antibody. These modifications are made to further refine antibody performance. A humanized antibody heavy or light chain can comprise substantially all of at least one or more variable regions, in which all or substantially all of the CDRs correspond to those of a nonhuman immunoglobulin and all or substantially all of the FRs are those of a human immunoglobulin sequence. In certain embodiments, the humanized antibody will comprise at least a portion of an immunoglobulin constant region (Fc), typically that of a human immunoglobulin. For further details, see, Jones et al., 1986, Nature 321:522-25; Riechmann et al., 1988, Nature 332:323-29; Presta, 1992, Curr. Op. Struct. Biol. 2:593-96; Carter et al., 1992, Proc. Natl. Acad. Sci. USA 89:4285-89; U.S. Pat. Nos. 6,800,738; 6,719,971; 6,639,055; 6,407,213; and 6,054,297.

[0110] In certain embodiments, the binding molecules or antigen binding domains can comprise portions of a “fully human antibody” or “human antibody,” wherein the terms are used interchangeably herein and refer to an antibody that comprises a human variable region and, for example, a human constant region. The binding molecules may comprise a single domain antibody sequence. In specific embodiments, the terms refer to an antibody that comprises a variable region and constant region of human origin. “Fully human” antibodies, in certain embodiments, can also encompass antibodies which bind polypeptides and are encoded by nucleic acid sequences which are naturally occurring somatic variants of human germline immunoglobulin nucleic acid sequence. The term “fully human antibody” includes antibodies having variable and constant regions corresponding to human germline immunoglobulin sequences as described by Kabat et al. (See Kabat et al. (1991) Sequences of Proteins of Immunological Interest, Fifth Edition, U.S. Department of Health and Human Services, NIH Publication No. 91-3242). A “human antibody” is one that possesses an amino acid sequence which corresponds to that of an antibody produced by a human and/or has been made using any of the techniques for making human antibodies. This definition of a human antibody specifically excludes a humanized antibody comprising non-human antigen-binding residues. Human antibodies can be produced using various techniques known in the art, including phage-display libraries (Hoogenboom and Winter, 1991, J. Mol. Biol. 227:381; Marks et al., 1991, J. Mol. Biol. 222:581) and yeast display libraries (Chao et al., 2006, Nature Protocols 1: 755-68). Also available for the preparation of human monoclonal antibodies are methods described in Cole et al., Monoclonal Antibodies and Cancer Therapy 77 (1985); Boerner et al., 1991, J. Immunol. 147(1):86-95; and van Dijk and van de Winkel, 2001, Curr. Opin. Pharmacol. 5: 368-74. Human antibodies can be prepared by administering the antigen to a transgenic animal that has been modified to produce such antibodies in response to antigenic challenge, but whose endogenous loci have been disabled, e.g., mice (see, e.g., Jakobovits, 1995, Curr. Opin. Biotechnol. 6(5):561-66; Bruggemann and Taussing, 1997, Curr. Opin. Biotechnol. 8(4):455-58; and U.S. Pat. Nos. 6,075,181 and 6,150,584 regarding XENOMOUSE™ technology). See also, for example, Li et al., 2006, Proc. Natl. Acad. Sci. USA 103:3557-62 regarding human antibodies generated via a human B-cell hybridoma technology.

[0111] In certain embodiments, the binding molecules or antigen binding domains can comprise portions of a “recombinant human antibody,” wherein the phrase includes human antibodies that are prepared, expressed, created or isolated by recombinant means, such as antibodies expressed using a recombinant expression vector transfected into a host cell, antibodies isolated from a recombinant, combinatorial human antibody library, antibodies isolated from an animal (e.g., a mouse or cow) that is transgenic and/or transchromosomal for human immunoglobulin genes (see e.g., Taylor, L. D. et al. (1992) Nucl. Acids Res. 20:6287-6295) or antibodies prepared, expressed, created or isolated by any other means that involves splicing of human immunoglobulin gene sequences to other DNA sequences. Such recombinant human antibodies can have variable and constant regions derived from human germline immunoglobulin sequences (See Kabat, E. A. et al. (1991) Sequences of Proteins of Immunological Interest, Fifth Edition, U.S. Department of Health and Human Services, NIH Publication No. 91-3242). In certain embodiments, however, such recombinant human antibodies are subjected to in vitro mutagenesis (or, when an animal transgenic for human Ig sequences is used, in vivo somatic mutagenesis) and thus the amino acid sequences of the VH and VL regions of the recombinant antibodies are sequences that, while derived from and related to human germline VH and VL sequences, may not naturally exist within the human antibody germline repertoire in vivo.

[0112] In certain embodiments, the binding molecules or antigen binding domains can comprise a portion of a “monoclonal antibody,” wherein the term as used herein refers to an antibody obtained from a population of substantially homogeneous antibodies, e.g., the individual antibodies comprising the population are identical except for possible naturally occurring mutations that may be present in minor amounts or well-known post-translational modifications such as amino acid isomerization or deamidation, methionine oxidation or asparagine or glutamine deamidation, each monoclonal antibody will typically recognize a single epitope on the antigen. In specific embodiments, a “monoclonal antibody,” as used herein, is an antibody produced by a single hybridoma or other cell. The term “monoclonal” is not limited to any particular method for making the antibody. For example, the monoclonal antibodies useful in the present disclosure may be prepared by the hybridoma methodology first described by Kohler et al., 1975, Nature 256:495, or may be made using recombinant DNA methods in bacterial or eukaryotic animal or plant cells (see, e.g., U.S. Pat. No. 4,816,567). The “monoclonal antibodies” may also be isolated from phage antibody libraries using the techniques described in Clackson et al., 1991, Nature 352:624-28 and Marks et al., 1991, J. Mol. Biol. 222:581-97, for example. Other methods for the preparation of clonal cell lines and of monoclonal antibodies expressed thereby are well known in the art. See, e.g., Short Protocols in Molecular Biology (Ausubel et al. eds., 5th ed. 2002).

[0113] A typical 4-chain antibody unit is a heterotetrameric glycoprotein composed of two identical light (L) chains and two identical heavy (H) chains. In the case of IgGs, the 4-chain unit is generally about 150,000 daltons. Each L chain is linked to an H chain by one covalent disulfide bond, while the two H chains are linked to each other by one or more disulfide bonds depending on the H chain isotype. Each H and L chain also has regularly spaced intrachain disulfide bridges. Each H chain has at the N-terminus, a variable domain (VH) followed by three constant domains (CH) for each of the α and γ chains and four CH domains for and F isotypes. Each L chain has at the N-terminus, a variable domain (VL) followed by a constant domain (CL) at its other end. The VL is aligned with the VH, and the CL is aligned with the first constant domain of the heavy chain (CH1). Particular amino acid residues are believed to form an interface between the light chain and heavy chain variable domains. The pairing of a VH and VL together forms a single antigen-binding site. For the structure and properties of the different classes of antibodies, see, for example, Basic and Clinical Immunology 71 (Stites et al. eds., 8th ed. 1994); and Immunobiology (Janeway et al. eds., 5^{th} ed. 2001).

[0114] The term “Fab” or “Fab region” refers to an antibody region that binds to antigens. A conventional IgG usually comprises two Fab regions, each residing on one of the two arms of the Y-shaped IgG structure. Each Fab region is typically composed of one variable region and one constant region of each of the heavy and the light chain. More specifically, the variable region and the constant region of the heavy chain in a Fab region are VH and CH1 regions, and the variable region and the constant region of the light chain in a Fab region are VL and CL regions. The VH, CH1, VL, and CL in a Fab region can be arranged in various ways to confer an antigen binding capability according to the present disclosure. For example, VH and CH1 regions can be on one polypeptide, and VL and CL regions can be on a separate polypeptide, similarly to a Fab region of a conventional IgG. Alternatively, VH, CH1, VL and CL regions can all be on the same polypeptide and oriented in different orders as described in more detail the sections below.

[0115] The term “variable region,” “variable domain,” “V region,” or “V domain” refers to a portion of the light or heavy chains of an antibody that is generally located at the amino-terminal of the light or heavy chain and has a length of about 120 to 130 amino acids in the heavy chain and about 100 to 110 amino acids in the light chain, and are used in the binding and specificity of each particular antibody for its particular antigen. The variable region of the heavy chain may be referred to as “VH.” The variable region of the light chain may be referred to as “VL.” The term “variable” refers to the fact that certain segments of the variable regions differ extensively in sequence among antibodies. The V region mediates antigen binding and defines specificity of a particular antibody for its particular antigen. However, the variability is not evenly distributed across the 110-amino acid span of the variable regions. Instead, the V regions consist of less variable (e.g., relatively invariant) stretches called framework regions (FRs) of about 15-30 amino acids separated by shorter regions of greater variability (e.g., extreme variability) called “hypervariable regions” that are each about 9-12 amino acids long. The variable regions of heavy and light chains each comprise four FRs, largely adopting a R sheet configuration, connected by three hypervariable regions, which form loops connecting, and in some cases form part of, the R sheet structure. The hypervariable regions in each chain are held together in close proximity by the FRs and, with the hypervariable regions from the other chain, contribute to the formation of the antigen-binding site of antibodies (see, e.g., Kabat et al., Sequences of Proteins of Immunological Interest (5th ed. 1991)). The constant regions are not involved directly in binding an antibody to an antigen, but exhibit various effector functions, such as participation of the antibody in antibody dependent cellular cytotoxicity (ADCC) and complement dependent cytotoxicity (CDC). The variable regions differ extensively in sequence between different antibodies. In specific embodiments, the variable region is a human variable region.

[0116] The term “variable region residue numbering according to Kabat” or “amino acid position numbering as in Kabat”, and variations thereof, refer to the numbering system used for heavy chain variable regions or light chain variable regions of the compilation of antibodies in Kabat et al., supra. Using this numbering system, the actual linear amino acid sequence may contain fewer or additional amino acids corresponding to a shortening of, or insertion into, an FR or CDR of the variable domain. For example, a heavy chain variable domain may include a single amino acid insert (residue 52a according to Kabat) after residue 52 and three inserted residues (e.g., residues 82a, 82b, and 82c, etc. according to Kabat) after residue 82. The Kabat numbering of residues may be determined for a given antibody by alignment at regions of homology of the sequence of the antibody with a “standard” Kabat numbered sequence. The Kabat numbering system is generally used when referring to a residue in the variable domain (approximately residues 1-107 of the light chain and residues 1-113 of the heavy chain) (e.g., Kabat et al., supra). The “EU numbering system” or “EU index” is generally used when referring to a residue in an immunoglobulin heavy chain constant region (e.g., the EU index reported in Kabat et al., supra). The “EU index as in Kabat” refers to the residue numbering of the human IgG 1 EU antibody. Other numbering systems have been described, for example, by AbM, Chothia, Contact, IMGT, and AHon.

[0117] The term “heavy chain” when used in reference to an antibody refers to a polypeptide chain of about 50-70 kDa, wherein the amino-terminal portion includes a variable region of about 120 to 130 or more amino acids, and a carboxy-terminal portion includes a constant region. The constant region can be one of five distinct types, (e.g., isotypes) referred to as alpha (α), delta (δ), epsilon (ε), gamma (γ), and mu (μ), based on the amino acid sequence of the heavy chain constant region. The distinct heavy chains differ in size: α, δ, and γ contain approximately 450 amino acids, while μ and ε contain approximately 550 amino acids. When combined with a light chain, these distinct types of heavy chains give rise to five well known classes (e.g., isotypes) of antibodies, IgA, IgD, IgE, IgG, and IgM, respectively, including four subclasses of IgG, namely IgG1, IgG2, IgG3, and IgG4.

[0118] The term “light chain” when used in reference to an antibody refers to a polypeptide chain of about 25 kDa, wherein the amino-terminal portion includes a variable region of about 100 to about 110 or more amino acids, and a carboxy-terminal portion includes a constant region. The approximate length of a light chain is 211 to 217 amino acids. There are two distinct types, referred to as kappa (κ) or lambda (λ) based on the amino acid sequence of the constant domains.

[0119] In addition to the heavy and light constant domains, antibodies contain an antigen-binding region that is made up of a light chain variable region (VL) and a heavy chain variable region (VH), each of which contains three domains (i.e., complementarity determining regions 1 (CDR1), CDR2 and CDR3. A “CDR” refers to one of three hypervariable regions (HCDR1, HCDR2 or HCDR3) within the non-framework region of the immunoglobulin (Ig or antibody) VH β-sheet framework, or one of three hypervariable regions (LCDR1, LCDR2 or LCDR3) within the non-framework region of the antibody VL β-sheet framework. Accordingly, CDRs are variable region sequences interspersed within the framework region sequences. CDR regions are well known to those skilled in the art and have been defined by, for example, Kabat as the regions of most hypervariability within the antibody variable (V) domains (Kabat et al., J. Biol. Chem. 252:6609-6616 (1977); Kabat, Adv. Prot. Chem. 32:1-75 (1978)). CDR region sequences also have been defined structurally by Chothia as those residues that are not part of the conserved β-sheet framework, and thus are able to adapt different conformations (Chothia and Lesk, J. Mol. Biol. 196:901-917 (1987)). Both terminologies are well recognized in the art. CDR region sequences have also been defined by AbM, Contact and IMGT. Exemplary CDR region sequences are illustrated herein, for example, in the Sequence Listing, and tables provided in the Examples below. The positions of CDRs within a canonical antibody variable region have been determined by comparison of numerous structures (Al-Lazikani et al., J. Mol. Biol. 273:927-948 (1997); Morea et al., Methods 20:267-279 (2000)). Because the number of residues within a hypervariable region varies in different antibodies, additional residues relative to the canonical positions are conventionally numbered with a, b, c and so forth next to the residue number in the canonical variable region numbering scheme (Al-Lazikani et al., supra (1997)). Such nomenclature is similarly well known to those skilled in the art.

[0120] The light chain variable region CDR1 domain is interchangeably referred to herein as LCDR1 or VL CDR1. The light chain variable region CDR2 domain is interchangeably referred to herein as LCDR2 or VL CDR2. The light chain variable region CDR3 domain is interchangeably referred to herein as LCDR3 or VL CDR3. The heavy chain variable region CDR1 domain is interchangeably referred to herein as HCDR1 or VH CDR1. The heavy chain variable region CDR2 domain is interchangeably referred to herein as HCDR2 or VH CDR2. The heavy chain variable region CDR1 domain is interchangeably referred to herein as HCDR3 or VH CDR3.

[0121] The term “hypervariable region”, such as a VH or VL, when used herein refers to the regions of an antibody variable region that are hypervariable in sequence and/or form structurally defined loops. Generally, antibodies comprise six hypervariable regions; three in the VH (HCDR1, HCDR2, HCDR3), and three in the VL (LCDR1, LCDR2, LCDR3). A number of hypervariable region delineations are in use and are encompassed herein. The “Kabat” CDRs are based on sequence variability and are the most commonly used (see, e.g., Kabat et al., Sequences of Proteins of Immunological Interest, 5th Ed. Public Health Service, National Institutes of Health, Bethesda, Md. (1991)). “Chothia” refers instead to the location of the structural loops (see, e.g., Chothia and Lesk, J. Mol. Biol. 196:901-917 (1987)). The end of the Chothia CDR-HCDR1 loop when numbered using the Kabat numbering convention varies between H32 and H34 depending on the length of the loop (this is because the Kabat numbering scheme places the insertions at H35A and H35B; if neither 35A nor 35B is present, the loop ends at 32; if only 35A is present, the loop ends at 33; if both 35A and 35B are present, the loop ends at 34). The “AbM” hypervariable regions represent a compromise between the Kabat CDRs and Chothia structural loops, and are used by Oxford Molecular's AbM antibody modeling software (see, e.g., Martin, in Antibody Engineering, Vol. 2, Chapter 3, Springer Verlag). “Contact” hypervariable regions are based on an analysis of the available complex crystal structures.

[0122] Recently, a universal numbering system has been developed and widely adopted, ImMunoGeneTics (IMGT) Information System® (Lafranc et al., Dev. Comp. Immunol. 27(1):55-77 (2003)). IMGT is an integrated information system specializing in immunoglobulins (IG), T cell receptors (TR) and major histocompatibility complex (MHC) of human and other vertebrates. Herein, the CDRs are referred to in terms of both the amino acid sequence and the location within the light or heavy chain. As the “location” of the CDRs within the structure of the immunoglobulin variable domain is conserved between species and present in structures called loops, by using numbering systems that align variable domain sequences according to structural features, CDR and framework residues and are readily identified. This information can be used in grafting and replacement of CDR residues from immunoglobulins of one species into an acceptor framework from, typically, a human antibody. An additional numbering system (AHon) has been developed by Honegger and Pluckthun, J. Mol. Biol. 309: 657-670 (2001). Correspondence between the numbering system, including, for example, the Kabat numbering and the IMGT unique numbering system, is well known to one skilled in the art (see, e.g., Kabat, supra; Chothia and Lesk, supra; Martin, supra; Lefranc et al., supra). An Exemplary system, shown herein, combines Kabat and Chothia.

TABLE 1
CDRs

| | Exemplary | IMGT | Kabat | AbM | Chothia | Contact |
|---|---|---|---|---|---|---|
| V_{H} CDR1 | 26-35 | 27-38 | 31-35 | 26-35 | 26-32 | 30-35 |
| V_{H} CDR2 | 50-65 | 56-65 | 50-65 | 50-58 | 53-55 | 47-58 |
| V_{H} CDR3 | 95-102 | 105-117 | 95-102 | 95-102 | 96-101 | 93-101 |
| V_{L} CDR1 | 24-34 | 27-38 | 24-34 | 24-34 | 26-32 | 30-36 |
| V_{L} CDR2 | 50-56 | 56-65 | 50-56 | 50-56 | 50-52 | 46-55 |
| V_{L} CDR3 | 89-97 | 105-117 | 89-97 | 89-97 | 91-96 | 89-96 |

[0123] Hypervariable regions may comprise “extended hypervariable regions” as follows: 24-36 or 24-34 (LCDR1), 46-56 or 50-56 (LCDR2) and 89-97 or 89-96 (LCDR3) in the VL and 26-35 or 26-35A (HCDR1), 50-65 or 49-65 (HCDR2) and 93-102, 94-102, or 95-102 (HCDR3) in the VH. CDR sequences, reflecting each of the above numbering schemes, are provided herein, including in the Sequence Listing.

[0124] The term “constant region” or “constant domain” refers to a carboxy terminal portion of the light and heavy chain which is not directly involved in binding of the antibody to antigen but exhibits various effector function, such as interaction with the Fc receptor. The term refers to the portion of an immunoglobulin molecule having a more conserved amino acid sequence relative to the other portion of the immunoglobulin, the variable region, which contains the antigen binding site. The constant region may contain the CH1, CH2, and CH3 regions of the heavy chain and the CL region of the light chain.

[0125] The term “framework” or “FR” refers to those variable region residues flanking the CDRs. FR residues are present, for example, in chimeric, humanized, human, domain antibodies (e.g., single domain antibodies), diabodies, linear antibodies, and bispecific antibodies. FR residues are those variable domain residues other than the hypervariable region residues or CDR residues.

[0126] The term “Fc region” herein is used to define a C-terminal region of an immunoglobulin heavy chain, including, for example, native sequence Fc regions, recombinant Fc regions, and variant Fc regions. Although the boundaries of the Fc region of an immunoglobulin heavy chain might vary, the human IgG heavy chain Fc region is often defined to stretch from an amino acid residue at position Cys226, or from Pro230, to the carboxyl-terminus thereof. The C-terminal lysine (residue 447 according to the EU numbering system) of the Fc region may be removed, for example, during production or purification of the antibody, or by recombinantly engineering the nucleic acid encoding a heavy chain of the antibody. Accordingly, a composition of intact antibodies may comprise antibody populations with all K447 residues removed, antibody populations with no K447 residues removed, and antibody populations having a mixture of antibodies with and without the K447 residue. A “functional Fc region” possesses an “effector function” of a native sequence Fc region. Exemplary “effector functions” include C1q binding; CDC; Fc receptor binding; ADCC; phagocytosis; downregulation of cell surface receptors (e.g., B cell receptor), etc. Such effector functions generally require the Fc region to be combined with a binding region or binding domain (e.g., an antibody variable region or domain) and can be assessed using various assays known to those skilled in the art. A “variant Fc region” comprises an amino acid sequence which differs from that of a native sequence Fc region by virtue of at least one amino acid modification (e.g., substituting, addition, or deletion). In certain embodiments, the variant Fc region has at least one amino acid substitution compared to a native sequence Fc region or to the Fc region of a parent polypeptide, for example, from about one to about ten amino acid substitutions, or from about one to about five amino acid substitutions in a native sequence Fc region or in the Fc region of a parent polypeptide. The variant Fc region herein can possess at least about 80% homology with a native sequence Fc region and/or with an Fc region of a parent polypeptide, or at least about 90% homology therewith, for example, at least about 95% homology therewith.

[0127] As used herein, an “epitope” is a term in the art and refers to a localized region of an antigen to which a binding molecule (e.g., an antibody comprising a single domain antibody sequence) can specifically bind. An epitope can be a linear epitope or a conformational, non-linear, or discontinuous epitope. In the case of a polypeptide antigen, for example, an epitope can be contiguous amino acids of the polypeptide (a “linear” epitope) or an epitope can comprise amino acids from two or more non-contiguous regions of the polypeptide (a “conformational,” “non-linear” or “discontinuous” epitope). It will be appreciated by one of skill in the art that, in general, a linear epitope may or may not be dependent on secondary, tertiary, or quaternary structure. For example, in some embodiments, a binding molecule binds to a group of amino acids regardless of whether they are folded in a natural three dimensional protein structure. In other embodiments, a binding molecule requires amino acid residues making up the epitope to exhibit a particular conformation (e.g., bend, twist, turn or fold) in order to recognize and bind the epitope.

[0128] By “enhance” or “promote,” or “increase” or “expand” or “improve” refers generally to the ability of a composition contemplated herein to produce, elicit, or cause a greater physiological response (i.e., downstream effects) compared to the response caused by either vehicle or a control molecule/composition. A measurable physiological response may include but is not limited to an increase in forward or reverse transcytosis, among others apparent from the understanding in the art and the description herein. In certain embodiments, an “increased” or “enhanced” amount can be a “statistically significant” amount, and may include an increase that is 1.1, 1.2, 1.5, 2, 3, 4, 5, 6, 7, 8, 9, 10, 15, 20, 30 or more times (e.g., 500, 1000 times) (including all integers and decimal points in between and above 1, e.g., 1.5, 1.6, 1.7. 1.8, etc.) the response produced by vehicle or a control composition.

[0129] The terms “polypeptide” and “peptide” and “protein” are used interchangeably herein and refer to polymers of amino acids of any length. The polymer may be linear or branched, it may comprise modified amino acids, and it may be interrupted by non-amino acids. The terms also encompass an amino acid polymer that has been modified naturally or by intervention; for example, disulfide bond formation, glycosylation, lipidation, acetylation, phosphorylation, or any other manipulation or modification. Also included within the definition are, for example, polypeptides containing one or more analogs of an amino acid, including but not limited to, unnatural amino acids, as well as other modifications known in the art. It is understood that, because the polypeptides of this disclosure may be based upon antibodies or other members of the immunoglobulin superfamily, in certain embodiments, a “polypeptide” can occur as a single chain or as two or more associated chains.

[0130] The term “vector” refers to a substance that is used to carry or include a nucleic acid sequence, including for example, a nucleic acid sequence encoding a binding molecule (e.g., an antibody) as described herein, in order to introduce a nucleic acid sequence into a host cell. Vectors applicable for use include, for example, expression vectors, plasmids, phage vectors, viral vectors, episomes, and artificial chromosomes, which can include selection sequences or markers operable for stable integration into a host cell's chromosome. Additionally, the vectors can include one or more selectable marker genes and appropriate expression control sequences. Selectable marker genes that can be included, for example, provide resistance to antibiotics or toxins, complement auxotrophic deficiencies, or supply critical nutrients not in the culture media. Expression control sequences can include constitutive and inducible promoters, transcription enhancers, transcription terminators, and the like, which are well known in the art. When two or more nucleic acid molecules are to be co-expressed (e.g., both an antibody heavy and light chain or an antibody VH and VL), both nucleic acid molecules can be inserted, for example, into a single expression vector or in separate expression vectors. For single vector expression, the encoding nucleic acids can be operationally linked to one common expression control sequence or linked to different expression control sequences, such as one inducible promoter and one constitutive promoter. The introduction of nucleic acid molecules into a host cell can be confirmed using methods well known in the art. Such methods include, for example, nucleic acid analysis such as Northern blots or polymerase chain reaction (PCR) amplification of mRNA, immunoblotting for expression of gene products, or other suitable analytical methods to test the expression of an introduced nucleic acid sequence or its corresponding gene product. It is understood by those skilled in the art that the nucleic acid molecules are expressed in a sufficient amount to produce a desired product and it is further understood that expression levels can be optimized to obtain sufficient expression using methods well known in the art.

[0131] The term “host” as used herein refers to an animal, such as a mammal (e.g., a human).

[0132] The term “host cell” as used herein refers to a particular subject cell that may be transfected with a nucleic acid molecule and the progeny or potential progeny of such a cell. Progeny of such a cell may not be identical to the parent cell transfected with the nucleic acid molecule due to mutations or environmental influences that may occur in succeeding generations or integration of the nucleic acid molecule into the host cell genome.

[0133] An “isolated nucleic acid” is a nucleic acid, for example, an RNA, DNA, or a mixed nucleic acids, which is substantially separated from other genome DNA sequences as well as proteins or complexes such as ribosomes and polymerases, which naturally accompany a native sequence. An “isolated” nucleic acid molecule is one which is separated from other nucleic acid molecules which are present in the natural source of the nucleic acid molecule. Moreover, an “isolated” nucleic acid molecule, such as a cDNA molecule, can be substantially free of other cellular material, or culture medium when produced by recombinant techniques, or substantially free of chemical precursors or other chemicals when chemically synthesized. In a specific embodiment, one or more nucleic acid molecules encoding a single domain antibody or an antibody as described herein are isolated or purified. The term embraces nucleic acid sequences that have been removed from their naturally occurring environment, and includes recombinant or cloned DNA isolates and chemically synthesized analogues or analogues biologically synthesized by heterologous systems. A substantially pure molecule may include isolated forms of the molecule.

[0134] “Polynucleotide” or “nucleic acid,” as used interchangeably herein, refers to polymers of nucleotides of any length and includes DNA and RNA. The nucleotides can be deoxyribonucleotides, ribonucleotides, modified nucleotides or bases, and/or their analogs, or any substrate that can be incorporated into a polymer by DNA or RNA polymerase or by a synthetic reaction. A polynucleotide may comprise modified nucleotides, such as methylated nucleotides and their analogs. “Oligonucleotide,” as used herein, refers to short, generally single-stranded, synthetic polynucleotides that are generally, but not necessarily, fewer than about 200 nucleotides in length. The terms “oligonucleotide” and “polynucleotide” are not mutually exclusive. The description above for polynucleotides is equally and fully applicable to oligonucleotides. A cell that produces a binding molecule of the present disclosure may include a parent hybridoma cell, as well as bacterial and eukaryotic host cells into which nucleic acids encoding the antibodies have been introduced. Unless specified otherwise, the left-hand end of any single-stranded polynucleotide sequence disclosed herein is the 5′ end; the left-hand direction of double-stranded polynucleotide sequences is referred to as the 5′ direction. The direction of 5′ to 3′ addition of nascent RNA transcripts is referred to as the transcription direction; sequence regions on the DNA strand having the same sequence as the RNA transcript that are 5′ to the 5′ end of the RNA transcript are referred to as “upstream sequences”; sequence regions on the DNA strand having the same sequence as the RNA transcript that are 3′ to the 3′ end of the RNA transcript are referred to as “downstream sequences.”

[0135] As used herein, the term “operatively linked,” and similar phrases (e.g., genetically fused), when used in reference to nucleic acids or amino acids, refer to the operational linkage of nucleic acid sequences or amino acid sequence, respectively, placed in functional relationships with each other. For example, an operatively linked promoter, enhancer elements, open reading frame, 5′ and 3′ UTR, and terminator sequences result in the accurate production of a nucleic acid molecule (e.g., RNA). In some embodiments, operatively linked nucleic acid elements result in the transcription of an open reading frame and ultimately the production of a polypeptide (i.e., expression of the open reading frame). As another example, an operatively linked peptide is one in which the functional domains are placed with appropriate distance from each other to impart the intended function of each domain.

[0136] The term “pharmaceutically acceptable” as used herein means being approved by a regulatory agency of the Federal or a state government, or listed in United States Pharmacopeia, European Pharmacopeia, or other generally recognized Pharmacopeia for use in animals, and more particularly in humans.

[0137] “Excipient” means a pharmaceutically-acceptable material, composition, or vehicle, such as a liquid or solid filler, diluent, solvent, or encapsulating material. Excipients include, for example, encapsulating materials or additives such as absorption accelerators, antioxidants, binders, buffers, carriers, coating agents, coloring agents, diluents, disintegrating agents, emulsifiers, extenders, fillers, flavoring agents, humectants, lubricants, perfumes, preservatives, propellants, releasing agents, sterilizing agents, sweeteners, solubilizers, wetting agents and mixtures thereof. The term “excipient” can also refer to a diluent, adjuvant (e.g., Freunds' adjuvant (complete or incomplete) or vehicle.

[0138] In some embodiments, excipients are pharmaceutically acceptable excipients. Examples of pharmaceutically acceptable excipients include buffers, such as phosphate, citrate, and other organic acids; antioxidants, including ascorbic acid; low molecular weight (e.g., fewer than about 10 amino acid residues) polypeptide; proteins, such as serum albumin, gelatin, or immunoglobulins; hydrophilic polymers, such as polyvinylpyrrolidone; amino acids, such as glycine, glutamine, asparagine, arginine, or lysine; monosaccharides, disaccharides, and other carbohydrates, including glucose, mannose, or dextrins; chelating agents, such as EDTA; sugar alcohols, such as mannitol or sorbitol; salt-forming counterions, such as sodium; and/or nonionic surfactants, such as TWEEN™, polyethylene glycol (PEG), and PLURONICS™. Other examples of pharmaceutically acceptable excipients are described in Remington and Gennaro, Remington's Pharmaceutical Sciences (18th ed. 1990).

[0139] In one embodiment, each component is “pharmaceutically acceptable” in the sense of being compatible with the other ingredients of a pharmaceutical formulation, and suitable for use in contact with the tissue or organ of humans and animals without excessive toxicity, irritation, allergic response, immunogenicity, or other problems or complications, commensurate with a reasonable benefit/risk ratio. See, e.g., Lippincott Williams & Wilkins: Philadelphia, Pa., 2005; Handbook of Pharmaceutical Excipients, 6th ed.; Rowe et al., Eds.; The Pharmaceutical Press and the American Pharmaceutical Association: 2009; Handbook of Pharmaceutical Additives, 3rd ed.; Ash and Ash Eds.; Gower Publishing Company: 2007; Pharmaceutical Preformulation and Formulation, 2nd ed.; Gibson Ed.; CRC Press LLC: Boca Raton, Fla., 2009. In some embodiments, pharmaceutically acceptable excipients are nontoxic to the cell or mammal being exposed thereto at the dosages and concentrations employed. In some embodiments, a pharmaceutically acceptable excipient is an aqueous pH buffered solution.

[0140] In some embodiments, excipients are sterile liquids, such as water and oils, including those of petroleum, animal, vegetable, or synthetic origin, such as peanut oil, soybean oil, mineral oil, sesame oil, and the like. Water is an exemplary excipient when a composition (e.g., a pharmaceutical composition) is administered intravenously. Saline solutions and aqueous dextrose and glycerol solutions can also be employed as liquid excipients, particularly for injectable solutions. An excipient can also include starch, glucose, lactose, sucrose, gelatin, malt, rice, flour, chalk, silica gel, sodium stearate, glycerol monostearate, talc, sodium chloride, dried skim milk, glycerol, propylene, glycol, water, ethanol, and the like. The composition, if desired, can also contain minor amounts of wetting or emulsifying agents, or pH buffering agents. Compositions can take the form of solutions, suspensions, emulsion, tablets, pills, capsules, powders, sustained-release formulations, and the like. Oral compositions, including formulations, can include standard excipients such as pharmaceutical grades of mannitol, lactose, starch, magnesium stearate, sodium saccharine, cellulose, magnesium carbonate, etc.

[0141] Compositions, including pharmaceutical compounds, may contain a binding molecule (e.g., an antibody), for example, in isolated or purified form, together with a suitable amount of excipients.

[0142] The term “effective amount” or “therapeutically effective amount” as used herein refers to the amount of a single domain antibody or a therapeutic molecule comprising an agent and the single domain antibody or pharmaceutical composition provided herein which is sufficient to result in the desired outcome.

[0143] The terms “subject” and “patient” may be used interchangeably. As used herein, in certain embodiments, a subject is a mammal, such as a non-primate (e.g., cow, pig, horse, cat, dog, rat, etc.) or a primate (e.g., monkey and human). In specific embodiments, the subject is a human. In one embodiment, the subject is a mammal, e.g., a human, diagnosed with a condition or disorder. In another embodiment, the subject is a mammal, e.g., a human, at risk of developing a condition or disorder.

[0144] “Administer” or “administration” refers to the act of injecting or otherwise physically delivering a substance as it exists outside the body into a patient, such as by mucosal, intradermal, intravenous, intramuscular delivery, and/or any other method of physical delivery described herein or known in the art.

[0145] As used herein, the terms “treat,” “treatment” and “treating” refer to the reduction or amelioration of the progression, severity, and/or duration of a disease or condition resulting from the administration of one or more therapies. Treating may be determined by assessing whether there has been a decrease, alleviation and/or mitigation of one or more symptoms associated with the underlying disorder such that an improvement is observed with the patient, despite that the patient may still be afflicted with the underlying disorder. The term “treating” includes both managing and ameliorating the disease. The terms “manage,” “managing,” and “management” refer to the beneficial effects that a subject derives from a therapy which does not necessarily result in a cure of the disease.

[0146] The terms “prevent,” “preventing,” and “prevention” refer to reducing the likelihood of the onset (or recurrence) of a disease, disorder, condition, or associated symptom(s) (e.g., diabetes or a cancer).

[0147] The terms “about” and “approximately” mean within 20%, within 15%, within 10%, within 9%, within 8%, within 7%, within 6%, within 5%, within 4%, within 3%, within 2%, within 1%, or less of a given value or range.

[0148] As used in the present disclosure and claims, the singular forms “a”, “an” and “the” include plural forms unless the context clearly dictates otherwise.

[0149] It is understood that wherever embodiments are described herein with the term “comprising” otherwise analogous embodiments described in terms of “consisting of” and/or “consisting essentially of” are also provided. It is also understood that wherever embodiments are described herein with the phrase “consisting essentially of” otherwise analogous embodiments described in terms of “consisting of” are also provided.

[0150] The term “between” as used in a phrase as such “between A and B” or “between A-B” refers to a range including both A and B.

[0151] The term “and/or” as used in a phrase such as “A and/or B” herein is intended to include both A and B; A or B; A (alone); and B (alone). Likewise, the term “and/or” as used in a phrase such as “A, B, and/or C” is intended to encompass each of the following embodiments: A, B, and C; A, B, or C; A or C; A or B; B or C; A and C; A and B; B and C; A (alone); B (alone); and C (alone).

### 5.2. Single Domain Antibodies

[0152] 5.2.1 Single Domain Antibodies Targeting pIgR

[0153] Provided herein are single domain antibodies (e.g., VHH domains) capable of binding to polymeric immunoglobulin receptor (pIgR), that can act as a delivery domain for therapeutic agents.

[0154] In various embodiments, the single domain antibodies (e.g., VHH domains) provided herein bind to human pIgR (Genbank ID: CR749533) (see Turula, H. & Wobus, C. E. The Role of the Polymeric Immunoglobulin Receptor and Secretory Immunoglobulins during Mucosal Infection and Immunity. Viruses 10 (2018)). In other embodiments, the single domain antibodies (e.g., VHH domains) provided herein bind to mouse pIgR.

[0155] Human pIgR (hpIgR) is an 82 kDa, single-pass transmembrane receptor containing a 620-residue extracellular domain (ECD), a 23-residue transmembrane domain and a 103-residue intracellular domain.

[0156] pIgR transports soluble polymeric forms of IgA and IgM into apical mucosal tissues from the basolateral side of the epithelium. The process of transporting polymeric immunoglobulins from the basolateral to apical side is transcytosis. Following transcytosis, the pIgR ECD that contains five domains (secretory component) is proteolytically cleaved and released into mucus with or without IgA. In addition to transcytosis, pIgR has several different functions that include, but are not limited to, conferring stability to IgA, immune exclusion, anti-inflammatory properties and homeostasis of commensals in the mucosal immune system.

[0157] Approximately 75% of total daily antibody production is directed to IgA molecules. In humans, there are two Ca genes encoding IgA subclass: IgA1 and IgA2 (IgA2m(1) and (2) allotypes). IgA1 has elongated hinge region lacking in IgA2, that contains several O-glycan sites and is susceptible to proteolytic cleavage. Endogenous IgA is present in various forms in a compartment-dependent manner. Monomeric IgA (mIgA) is the predominant form in serum (at a concentration of 1-3 mg/mL), primarily as IgA1 (about 90%) produced in bone marrow. Dimeric IgA (dIgA) is formed via S—S bridging of the C-terminal Fc tailpiece with J chain. dIgA is produced locally at target site of action and transported across mucosal surface into secretions of respiratory, GI and genitourinary tracts. Secretory IgA (S-IgA) is formed via dIgA complex with extracellular domain of polymeric Ig receptor (pIgR). Cleavage of secretory component (SC) at the mucosal surface of epithelial cells releases S-IgA.

[0158] The polymeric immunoglobulin receptor (pIgR) binds to soluble dimeric IgA via Fc and J-chain mediated interactions. pIgR does not bind or transport IgG molecules across mucosal epithelium. Though IgG molecules lack a lumen-targeted active transport mechanism, conferring pIgR-binding abilities to IgG can mediate selective transport of IgG antibodies into the mucosal lumen.

[0159] The structure of pIgR is summarized in FIG. 2A. A mechanism of pIgR-mediated transport is summarized in FIG. 2B. The expression of pIgR in various organs is shown in FIG. 3.

[0160] It is a surprising finding by the present disclosure that certain single domain antibodies provided herein transport from an apical surface to a basolateral surface (reverse transcytosis) as well as from the basolateral to apical side (transcytosis).

[0161] In some embodiments, the single domain antibody (e.g., VHH domain) provided herein competes with IgA binding to the pIgR. In some embodiments, the single domain antibody (e.g., VHH domain) provided herein promotes IgA binding to the pIgR. In some embodiments, the K_{D} of the binding of the single domain antibody (e.g., VHH domain) provided herein to pIgR is from 4 to 525 nM. In some embodiments, the K_{D} of the binding of the single domain antibody (e.g., VHH domain) provided herein to pIgR is less than 525 nM. In some embodiments, the K_{D} of the binding of the single domain antibody (e.g., VHH domain) provided herein to pIgR is less than 400 nM. In some embodiments, the K_{D} of the binding of the single domain antibody (e.g., VHH domain) provided herein to pIgR is less than 350 nM. In some embodiments, the K_{D} of the binding of the single domain antibody (e.g., VHH domain) provided herein to pIgR is less than 300 nM. In some embodiments, the K_{D} of the binding of the single domain antibody (e.g., VHH domain) provided herein to pIgR is less than 250 nM. In some embodiments, the K_{D} of the binding of the single domain antibody (e.g., VHH domain) provided herein to pIgR is less than 200 nM. In some embodiments, the K_{D} of the binding of the single domain antibody (e.g., VHH domain) provided herein to pIgR is less than 150 nM. In some embodiments, the K_{D} of the binding of the single domain antibody (e.g., VHH domain) provided herein to pIgR is less than 100 nM. In some embodiments, the K_{D} of the binding of the single domain antibody (e.g., VHH domain) provided herein to pIgR is less than 50 nM. In some embodiments, the K_{D} of the binding of the single domain antibody (e.g., VHH domain) provided herein to pIgR is from 4 to 525 nm. In some embodiments, the K_{D} of the binding of the single domain antibody (e.g., VHH domain) provided herein to pIgR is from 4 to 34 nm.

[0162] In some embodiments, the Tₘ of the single domain antibody (e.g., VHH domain) is from about 36 to about 53° C. In some embodiments, the Tₘ of the single domain antibody (e.g., VHH domain) is from 53 to 77° C. In some embodiments, the Tₘ of the single domain antibody (e.g., VHH domain) is from 53.9 to 76.4° C. In some embodiments, the Tₘ of the single domain antibody (e.g., VHH domain) is from 61 to 77° C. In some embodiments, the Tₘ of the single domain antibody (e.g., VHH domain) is from 61 to 71° C.

[0163] In some embodiments, the EC50 value for single domain antibody (e.g., VHH domain) binding to an MDCK-hpIgR cell is less than 10 nM.

[0164] In some embodiments, the single domain antibody binds to an extracellular domain 1, an extracellular domain 2, an extracellular domain 1-2, an extracellular domain 3, an extracellular domain 2-3, an extracellular domain 4-5, or an extracellular domain 5 of pIgR. In some embodiments, the single domain antibody binds to an extracellular domain 1 of pIgR. In some embodiments, the single domain antibody binds to an extracellular domain 2 of pIgR. In other embodiments, the single domain antibody binds to an extracellular domain 1-2 of pIgR. In other embodiments, the single domain antibody binds to an extracellular domain 3 of pIgR. In other embodiments, the single domain antibody binds to an extracellular domain 2-3 of pIgR. In yet other embodiments, the single domain antibody binds to an extracellular domain 4-5 of pIgR. In yet other embodiments, the single domain antibody binds to an extracellular domain 5 of pIgR.

[0165] In some embodiments, the single domain antibodies provide herein are VHH domains. Exemplary VHH domains are generated as described in Section 6 below, e.g., VHH domains comprising amino acid sequences of SEQ ID NOs: 1 to 122.

[0166] Thus, in some embodiments, provided herein is a single domain antibody that binds to pIgR comprising the following structure: FR1-CDR1-FR2-CDR2-FR3-CDR3-FR4, wherein the CDR sequences are selected for those in SEQ ID NOs: 1 to 122.

[0167] In some embodiments, there is provided an anti-plgR single domain antibody comprising one, two, or all three CDRs of the amino acid sequence of SEQ ID NO: 1.

[0168] In some embodiments, there is provided an anti-plgR single domain antibody comprising one, two, or all three CDRs of the amino acid sequence of SEQ ID NO: 2.

[0169] In some embodiments, there is provided an anti-plgR single domain antibody comprising one, two, or all three CDRs of the amino acid sequence of SEQ ID NO: 3.

[0170] In some embodiments, there is provided an anti-plgR single domain antibody comprising one, two, or all three CDRs of the amino acid sequence of SEQ ID NO: 4.

[0171] In some embodiments, there is provided an anti-plgR single domain antibody comprising one, two, or all three CDRs of the amino acid sequence of SEQ ID NO: 5.

[0172] In some embodiments, there is provided an anti-plgR single domain antibody comprising one, two, or all three CDRs of the amino acid sequence of SEQ ID NO: 6.

[0173] In some embodiments, there is provided an anti-plgR single domain antibody comprising one, two, or all three CDRs of the amino acid sequence of SEQ ID NO: 7.

[0174] In some embodiments, there is provided an anti-plgR single domain antibody comprising one, two, or all three CDRs of the amino acid sequence of SEQ ID NO: 8.

[0175] In some embodiments, there is provided an anti-plgR single domain antibody comprising one, two, or all three CDRs of the amino acid sequence of SEQ ID NO: 9.

[0176] In some embodiments, there is provided an anti-plgR single domain antibody comprising one, two, or all three CDRs of the amino acid sequence of SEQ ID NO: 10.

[0177] In some embodiments, there is provided an anti-plgR single domain antibody comprising one, two, or all three CDRs of the amino acid sequence of SEQ ID NO: 11.

[0178] In some embodiments, there is provided an anti-plgR single domain antibody comprising one, two, or all three CDRs of the amino acid sequence of SEQ ID NO: 12.

[0179] In some embodiments, there is provided an anti-plgR single domain antibody comprising one, two, or all three CDRs of the amino acid sequence of SEQ ID NO: 13.

[0180] In some embodiments, there is provided an anti-plgR single domain antibody comprising one, two, or all three CDRs of the amino acid sequence of SEQ ID NO: 14.

[0181] In some embodiments, there is provided an anti-plgR single domain antibody comprising one, two, or all three CDRs of the amino acid sequence of SEQ ID NO: 15.

[0182] In some embodiments, there is provided an anti-plgR single domain antibody comprising one, two, or all three CDRs of the amino acid sequence of SEQ ID NO: 16.

[0183] In some embodiments, there is provided an anti-plgR single domain antibody comprising one, two, or all three CDRs of the amino acid sequence of SEQ ID NO: 17.

[0184] In some embodiments, there is provided an anti-plgR single domain antibody comprising one, two, or all three CDRs of the amino acid sequence of SEQ ID NO: 18.

[0185] In some embodiments, there is provided an anti-plgR single domain antibody comprising one, two, or all three CDRs of the amino acid sequence of SEQ ID NO: 19.

[0186] In some embodiments, there is provided an anti-plgR single domain antibody comprising one, two, or all three CDRs of the amino acid sequence of SEQ ID NO: 20.

[0187] In some embodiments, there is provided an anti-plgR single domain antibody comprising one, two, or all three CDRs of the amino acid sequence of SEQ ID NO: 21.

[0188] In some embodiments, there is provided an anti-plgR single domain antibody comprising one, two, or all three CDRs of the amino acid sequence of SEQ ID NO: 22.

[0189] In some embodiments, there is provided an anti-plgR single domain antibody comprising one, two, or all three CDRs of the amino acid sequence of SEQ ID NO: 23.

[0190] In some embodiments, there is provided an anti-plgR single domain antibody comprising one, two, or all three CDRs of the amino acid sequence of SEQ ID NO: 24.

[0191] In some embodiments, there is provided an anti-plgR single domain antibody comprising one, two, or all three CDRs of the amino acid sequence of SEQ ID NO: 25.

[0192] In some embodiments, there is provided an anti-plgR single domain antibody comprising one, two, or all three CDRs of the amino acid sequence of SEQ ID NO: 26.

[0193] In some embodiments, there is provided an anti-plgR single domain antibody comprising one, two, or all three CDRs of the amino acid sequence of SEQ ID NO: 27.

[0194] In some embodiments, there is provided an anti-plgR single domain antibody comprising one, two, or all three CDRs of the amino acid sequence of SEQ ID NO: 28.

[0195] In some embodiments, there is provided an anti-plgR single domain antibody comprising one, two, or all three CDRs of the amino acid sequence of SEQ ID NO: 29.

[0196] In some embodiments, there is provided an anti-plgR single domain antibody comprising one, two, or all three CDRs of the amino acid sequence of SEQ ID NO: 30.

[0197] In some embodiments, there is provided an anti-plgR single domain antibody comprising one, two, or all three CDRs of the amino acid sequence of SEQ ID NO: 31.

[0198] In some embodiments, there is provided an anti-plgR single domain antibody comprising one, two, or all three CDRs of the amino acid sequence of SEQ ID NO: 32.

[0199] In some embodiments, there is provided an anti-plgR single domain antibody comprising one, two, or all three CDRs of the amino acid sequence of SEQ ID NO: 33.

[0200] In some embodiments, there is provided an anti-plgR single domain antibody comprising one, two, or all three CDRs of the amino acid sequence of SEQ ID NO: 34.

[0201] In some embodiments, there is provided an anti-plgR single domain antibody comprising one, two, or all three CDRs of the amino acid sequence of SEQ ID NO: 35.

[0202] In some embodiments, there is provided an anti-plgR single domain antibody comprising one, two, or all three CDRs of the amino acid sequence of SEQ ID NO: 36.

[0203] In some embodiments, there is provided an anti-plgR single domain antibody comprising one, two, or all three CDRs of the amino acid sequence of SEQ ID NO: 37.

[0204] In some embodiments, there is provided an anti-plgR single domain antibody comprising one, two, or all three CDRs of the amino acid sequence of SEQ ID NO: 38.

[0205] In some embodiments, there is provided an anti-plgR single domain antibody comprising one, two, or all three CDRs of the amino acid sequence of SEQ ID NO: 39.

[0206] In some embodiments, there is provided an anti-plgR single domain antibody comprising one, two, or all three CDRs of the amino acid sequence of SEQ ID NO: 40.

[0207] In some embodiments, there is provided an anti-plgR single domain antibody comprising one, two, or all three CDRs of the amino acid sequence of SEQ ID NO: 41.

[0208] In some embodiments, there is provided an anti-plgR single domain antibody comprising one, two, or all three CDRs of the amino acid sequence of SEQ ID NO: 42.

[0209] In some embodiments, there is provided an anti-plgR single domain antibody comprising one, two, or all three CDRs of the amino acid sequence of SEQ ID NO: 43.

[0210] In some embodiments, there is provided an anti-plgR single domain antibody comprising one, two, or all three CDRs of the amino acid sequence of SEQ ID NO: 44.

[0211] In some embodiments, there is provided an anti-plgR single domain antibody comprising one, two, or all three CDRs of the amino acid sequence of SEQ ID NO: 45.

[0212] In some embodiments, there is provided an anti-plgR single domain antibody comprising one, two, or all three CDRs of the amino acid sequence of SEQ ID NO: 46.

[0213] In some embodiments, there is provided an anti-plgR single domain antibody comprising one, two, or all three CDRs of the amino acid sequence of SEQ ID NO: 47.

[0214] In some embodiments, there is provided an anti-plgR single domain antibody comprising one, two, or all three CDRs of the amino acid sequence of SEQ ID NO: 48.

[0215] In some embodiments, there is provided an anti-plgR single domain antibody comprising one, two, or all three CDRs of the amino acid sequence of SEQ ID NO: 49.

[0216] In some embodiments, there is provided an anti-plgR single domain antibody comprising one, two, or all three CDRs of the amino acid sequence of SEQ ID NO: 50.

[0217] In some embodiments, there is provided an anti-plgR single domain antibody comprising one, two, or all three CDRs of the amino acid sequence of SEQ ID NO: 51.

[0218] In some embodiments, there is provided an anti-plgR single domain antibody comprising one, two, or all three CDRs of the amino acid sequence of SEQ ID NO: 52.

[0219] In some embodiments, there is provided an anti-plgR single domain antibody comprising one, two, or all three CDRs of the amino acid sequence of SEQ ID NO: 53.

[0220] In some embodiments, there is provided an anti-plgR single domain antibody comprising one, two, or all three CDRs of the amino acid sequence of SEQ ID NO: 54.

[0221] In some embodiments, there is provided an anti-plgR single domain antibody comprising one, two, or all three CDRs of the amino acid sequence of SEQ ID NO: 55.

[0222] In some embodiments, there is provided an anti-plgR single domain antibody comprising one, two, or all three CDRs of the amino acid sequence of SEQ ID NO: 56.

[0223] In some embodiments, there is provided an anti-plgR single domain antibody comprising one, two, or all three CDRs of the amino acid sequence of SEQ ID NO: 57.

[0224] In some embodiments, there is provided an anti-plgR single domain antibody comprising one, two, or all three CDRs of the amino acid sequence of SEQ ID NO: 58.

[0225] In some embodiments, there is provided an anti-plgR single domain antibody comprising one, two, or all three CDRs of the amino acid sequence of SEQ ID NO: 59.

[0226] In some embodiments, there is provided an anti-plgR single domain antibody comprising one, two, or all three CDRs of the amino acid sequence of SEQ ID NO: 60.

[0227] In some embodiments, there is provided an anti-plgR single domain antibody comprising one, two, or all three CDRs of the amino acid sequence of SEQ ID NO: 61.

[0228] In some embodiments, there is provided an anti-plgR single domain antibody comprising one, two, or all three CDRs of the amino acid sequence of SEQ ID NO: 62.

[0229] In some embodiments, there is provided an anti-plgR single domain antibody comprising one, two, or all three CDRs of the amino acid sequence of SEQ ID NO: 63.

[0230] In some embodiments, there is provided an anti-plgR single domain antibody comprising one, two, or all three CDRs of the amino acid sequence of SEQ ID NO: 64.

[0231] In some embodiments, there is provided an anti-plgR single domain antibody comprising one, two, or all three CDRs of the amino acid sequence of SEQ ID NO: 65.

[0232] In some embodiments, there is provided an anti-plgR single domain antibody comprising one, two, or all three CDRs of the amino acid sequence of SEQ ID NO: 66.

[0233] In some embodiments, there is provided an anti-plgR single domain antibody comprising one, two, or all three CDRs of the amino acid sequence of SEQ ID NO: 67.

[0234] In some embodiments, there is provided an anti-plgR single domain antibody comprising one, two, or all three CDRs of the amino acid sequence of SEQ ID NO: 68.

[0235] In some embodiments, there is provided an anti-plgR single domain antibody comprising one, two, or all three CDRs of the amino acid sequence of SEQ ID NO: 69.

[0236] In some embodiments, there is provided an anti-plgR single domain antibody comprising one, two, or all three CDRs of the amino acid sequence of SEQ ID NO: 70.

[0237] In some embodiments, there is provided an anti-plgR single domain antibody comprising one, two, or all three CDRs of the amino acid sequence of SEQ ID NO: 71.

[0238] In some embodiments, there is provided an anti-plgR single domain antibody comprising one, two, or all three CDRs of the amino acid sequence of SEQ ID NO: 72.

[0239] In some embodiments, there is provided an anti-plgR single domain antibody comprising one, two, or all three CDRs of the amino acid sequence of SEQ ID NO: 73.

[0240] In some embodiments, there is provided an anti-plgR single domain antibody comprising one, two, or all three CDRs of the amino acid sequence of SEQ ID NO: 74.

[0241] In some embodiments, there is provided an anti-plgR single domain antibody comprising one, two, or all three CDRs of the amino acid sequence of SEQ ID NO: 75.

[0242] In some embodiments, there is provided an anti-plgR single domain antibody comprising one, two, or all three CDRs of the amino acid sequence of SEQ ID NO: 76.

[0243] In some embodiments, there is provided an anti-plgR single domain antibody comprising one, two, or all three CDRs of the amino acid sequence of SEQ ID NO: 77.

[0244] In some embodiments, there is provided an anti-plgR single domain antibody comprising one, two, or all three CDRs of the amino acid sequence of SEQ ID NO: 78.

[0245] In some embodiments, there is provided an anti-plgR single domain antibody comprising one, two, or all three CDRs of the amino acid sequence of SEQ ID NO: 79.

[0246] In some embodiments, there is provided an anti-plgR single domain antibody comprising one, two, or all three CDRs of the amino acid sequence of SEQ ID NO: 80.

[0247] In some embodiments, there is provided an anti-plgR single domain antibody comprising one, two, or all three CDRs of the amino acid sequence of SEQ ID NO: 81.

[0248] In some embodiments, there is provided an anti-plgR single domain antibody comprising one, two, or all three CDRs of the amino acid sequence of SEQ ID NO: 82.

[0249] In some embodiments, there is provided an anti-plgR single domain antibody comprising one, two, or all three CDRs of the amino acid sequence of SEQ ID NO: 83.

[0250] In some embodiments, there is provided an anti-plgR single domain antibody comprising one, two, or all three CDRs of the amino acid sequence of SEQ ID NO: 84.

[0251] In some embodiments, there is provided an anti-plgR single domain antibody comprising one, two, or all three CDRs of the amino acid sequence of SEQ ID NO: 85.

[0252] In some embodiments, there is provided an anti-plgR single domain antibody comprising one, two, or all three CDRs of the amino acid sequence of SEQ ID NO: 86.

[0253] In some embodiments, there is provided an anti-plgR single domain antibody comprising one, two, or all three CDRs of the amino acid sequence of SEQ ID NO: 87.

[0254] In some embodiments, there is provided an anti-plgR single domain antibody comprising one, two, or all three CDRs of the amino acid sequence of SEQ ID NO: 88.

[0255] In some embodiments, there is provided an anti-plgR single domain antibody comprising one, two, or all three CDRs of the amino acid sequence of SEQ ID NO: 89.

[0256] In some embodiments, there is provided an anti-plgR single domain antibody comprising one, two, or all three CDRs of the amino acid sequence of SEQ ID NO: 90.

[0257] In some embodiments, there is provided an anti-plgR single domain antibody comprising one, two, or all three CDRs of the amino acid sequence of SEQ ID NO: 91.

[0258] In some embodiments, there is provided an anti-plgR single domain antibody comprising one, two, or all three CDRs of the amino acid sequence of SEQ ID NO: 92.

[0259] In some embodiments, there is provided an anti-plgR single domain antibody comprising one, two, or all three CDRs of the amino acid sequence of SEQ ID NO: 93.

[0260] In some embodiments, there is provided an anti-plgR single domain antibody comprising one, two, or all three CDRs of the amino acid sequence of SEQ ID NO: 94.

[0261] In some embodiments, there is provided an anti-plgR single domain antibody comprising one, two, or all three CDRs of the amino acid sequence of SEQ ID NO: 95.

[0262] In some embodiments, there is provided an anti-plgR single domain antibody comprising one, two, or all three CDRs of the amino acid sequence of SEQ ID NO: 96.

[0263] In some embodiments, there is provided an anti-plgR single domain antibody comprising one, two, or all three CDRs of the amino acid sequence of SEQ ID NO: 97.

[0264] In some embodiments, there is provided an anti-plgR single domain antibody comprising one, two, or all three CDRs of the amino acid sequence of SEQ ID NO: 98.

[0265] In some embodiments, there is provided an anti-plgR single domain antibody comprising one, two, or all three CDRs of the amino acid sequence of SEQ ID NO: 99.

[0266] In some embodiments, there is provided an anti-plgR single domain antibody comprising one, two, or all three CDRs of the amino acid sequence of SEQ ID NO: 100.

[0267] In some embodiments, there is provided an anti-plgR single domain antibody comprising one, two, or all three CDRs of the amino acid sequence of SEQ ID NO: 101.

[0268] In some embodiments, there is provided an anti-plgR single domain antibody comprising one, two, or all three CDRs of the amino acid sequence of SEQ ID NO: 102.

[0269] In some embodiments, there is provided an anti-plgR single domain antibody comprising one, two, or all three CDRs of the amino acid sequence of SEQ ID NO: 103.

[0270] In some embodiments, there is provided an anti-plgR single domain antibody comprising one, two, or all three CDRs of the amino acid sequence of SEQ ID NO: 104.

[0271] In some embodiments, there is provided an anti-plgR single domain antibody comprising one, two, or all three CDRs of the amino acid sequence of SEQ ID NO: 105.

[0272] In some embodiments, there is provided an anti-plgR single domain antibody comprising one, two, or all three CDRs of the amino acid sequence of SEQ ID NO: 106.

[0273] In some embodiments, there is provided an anti-plgR single domain antibody comprising one, two, or all three CDRs of the amino acid sequence of SEQ ID NO: 107.

[0274] In some embodiments, there is provided an anti-plgR single domain antibody comprising one, two, or all three CDRs of the amino acid sequence of SEQ ID NO: 108.

[0275] In some embodiments, there is provided an anti-plgR single domain antibody comprising one, two, or all three CDRs of the amino acid sequence of SEQ ID NO: 109.

[0276] In some embodiments, there is provided an anti-plgR single domain antibody comprising one, two, or all three CDRs of the amino acid sequence of SEQ ID NO: 110.

[0277] In some embodiments, there is provided an anti-plgR single domain antibody comprising one, two, or all three CDRs of the amino acid sequence of SEQ ID NO: 111.

[0278] In some embodiments, there is provided an anti-plgR single domain antibody comprising one, two, or all three CDRs of the amino acid sequence of SEQ ID NO: 112.

[0279] In some embodiments, there is provided an anti-plgR single domain antibody comprising one, two, or all three CDRs of the amino acid sequence of SEQ ID NO: 113.

[0280] In some embodiments, there is provided an anti-plgR single domain antibody comprising one, two, or all three CDRs of the amino acid sequence of SEQ ID NO: 114.

[0281] In some embodiments, there is provided an anti-plgR single domain antibody comprising one, two, or all three CDRs of the amino acid sequence of SEQ ID NO: 115.

[0282] In some embodiments, there is provided an anti-plgR single domain antibody comprising one, two, or all three CDRs of the amino acid sequence of SEQ ID NO: 116.

[0283] In some embodiments, there is provided an anti-plgR single domain antibody comprising one, two, or all three CDRs of the amino acid sequence of SEQ ID NO: 117.

[0284] In some embodiments, there is provided an anti-plgR single domain antibody comprising one, two, or all three CDRs of the amino acid sequence of SEQ ID NO: 118.

[0285] In some embodiments, there is provided an anti-plgR single domain antibody comprising one, two, or all three CDRs of the amino acid sequence of SEQ ID NO: 119.

[0286] In some embodiments, there is provided an anti-plgR single domain antibody comprising one, two, or all three CDRs of the amino acid sequence of SEQ ID NO: 120.

[0287] In some embodiments, there is provided an anti-plgR single domain antibody comprising one, two, or all three CDRs of the amino acid sequence of SEQ ID NO: 121.

[0288] In some embodiments, there is provided an anti-plgR single domain antibody comprising one, two, or all three CDRs of the amino acid sequence of SEQ ID NO: 122.

[0289] In some embodiments, the anti-plgR single domain antibody is camelid. In some embodiments, the anti-plgR single domain antibody is humanized. In some embodiments, the anti-plgR single domain antibody comprises an acceptor human framework, e.g., a human immunoglobulin framework or a human consensus framework.

[0290] In some embodiments, the single domain antibody has a CDR1 having an amino acid sequence of the CDR1 as set forth in SEQ ID NO: 1. In some embodiments, the single domain antibody has a CDR2 having an amino acid sequence of the CDR2 as set forth in SEQ ID NO: 1. In other embodiments, the single domain antibody has a CDR3 having an amino acid sequence of the CDR3 as set forth in SEQ ID NO: 1. In some embodiments, the single domain antibody has a CDR1 and a CDR2 having amino acid sequences of the CDR1 and the CDR2 as set forth in SEQ ID NO: 1. In some embodiments, the single domain antibody has a CDR1 and a CDR3 having amino acid sequences of the CDR1 and the CDR3 as set forth in SEQ ID NO: 1. In some embodiments, the single domain antibody has a CDR2 and a CDR3 having amino acid sequences of the CDR2 and the CDR3 as set forth in SEQ ID NO: 1. In some embodiments, the single domain antibody has a CDR1, a CDR2, and a CDR3 having amino acid sequences of the CDR1, the CDR2, and the CDR3 as set forth in SEQ ID NO: 1. CDR sequences can be determined according to well-known numbering systems, e.g., as described in Table 1 above. In some embodiments, the CDRs are according to IMGT numbering. In some embodiments, the CDRs are according to Kabat numbering. In some embodiments, the CDRs are according to AbM numbering. In other embodiments, the CDRs are according to Chothia numbering. In other embodiments, the CDRs are according to Contact numbering. In other embodiments, the CDRs are according to a combination of Kabat numbering and Chothia numbering. In some embodiments, the anti-plgR single domain antibody is camelid. In some embodiments, the anti-plgR single domain antibody is humanized. In some embodiments, the anti-plgR single domain antibody comprises an acceptor human framework, e.g., a human immunoglobulin framework or a human consensus framework.

[0291] In some embodiments, the single domain antibody has a CDR1 having an amino acid sequence of the CDR1 as set forth in SEQ ID NO: 2. In some embodiments, the single domain antibody has a CDR2 having an amino acid sequence of the CDR2 as set forth in SEQ ID NO: 2. In other embodiments, the single domain antibody has a CDR3 having an amino acid sequence of the CDR3 as set forth in SEQ ID NO: 2. In some embodiments, the single domain antibody has a CDR1 and a CDR2 having amino acid sequences of the CDR1 and the CDR2 as set forth in SEQ ID NO: 2. In some embodiments, the single domain antibody has a CDR1 and a CDR3 having amino acid sequences of the CDR1 and the CDR3 as set forth in SEQ ID NO: 2. In some embodiments, the single domain antibody has a CDR2 and a CDR3 having amino acid sequences of the CDR2 and the CDR3 as set forth in SEQ ID NO: 2. In some embodiments, the single domain antibody has a CDR1, a CDR2, and a CDR3 having amino acid sequences of the CDR1, the CDR2, and the CDR3 as set forth in SEQ ID NO: 2. CDR sequences can be determined according to well-known numbering systems, e.g., as described in Table 1 above. In some embodiments, the CDRs are according to IMGT numbering. In some embodiments, the CDRs are according to Kabat numbering. In some embodiments, the CDRs are according to AbM numbering. In other embodiments, the CDRs are according to Chothia numbering. In other embodiments, the CDRs are according to Contact numbering. In other embodiments, the CDRs are according to a combination of Kabat numbering and Chothia numbering. In some embodiments, the anti-plgR single domain antibody is camelid. In some embodiments, the anti-plgR single domain antibody is humanized. In some embodiments, the anti-plgR single domain antibody comprises an acceptor human framework, e.g., a human immunoglobulin framework or a human consensus framework.

[0292] In some embodiments, the single domain antibody has a CDR1 having an amino acid sequence of the CDR1 as set forth in SEQ ID NO: 3. In some embodiments, the single domain antibody has a CDR2 having an amino acid sequence of the CDR2 as set forth in SEQ ID NO: 3. In other embodiments, the single domain antibody has a CDR3 having an amino acid sequence of the CDR3 as set forth in SEQ ID NO: 3. In some embodiments, the single domain antibody has a CDR1 and a CDR2 having amino acid sequences of the CDR1 and the CDR2 as set forth in SEQ ID NO: 3. In some embodiments, the single domain antibody has a CDR1 and a CDR3 having amino acid sequences of the CDR1 and the CDR3 as set forth in SEQ ID NO: 3. In some embodiments, the single domain antibody has a CDR2 and a CDR3 having amino acid sequences of the CDR2 and the CDR3 as set forth in SEQ ID NO: 3. In some embodiments, the single domain antibody has a CDR1, a CDR2, and a CDR3 having amino acid sequences of the CDR1, the CDR2, and the CDR3 as set forth in SEQ ID NO: 3. CDR sequences can be determined according to well-known numbering systems, e.g., as described in Table 1 above. In some embodiments, the CDRs are according to IMGT numbering. In some embodiments, the CDRs are according to Kabat numbering. In some embodiments, the CDRs are according to AbM numbering. In other embodiments, the CDRs are according to Chothia numbering. In other embodiments, the CDRs are according to Contact numbering. In other embodiments, the CDRs are according to a combination of Kabat numbering and Chothia numbering. In some embodiments, the anti-plgR single domain antibody is camelid. In some embodiments, the anti-plgR single domain antibody is humanized. In some embodiments, the anti-plgR single domain antibody comprises an acceptor human framework, e.g., a human immunoglobulin framework or a human consensus framework.

[0293] In some embodiments, the single domain antibody has a CDR1 having an amino acid sequence of the CDR1 as set forth in SEQ ID NO: 4. In some embodiments, the single domain antibody has a CDR2 having an amino acid sequence of the CDR2 as set forth in SEQ ID NO: 4. In other embodiments, the single domain antibody has a CDR3 having an amino acid sequence of the CDR3 as set forth in SEQ ID NO: 4. In some embodiments, the single domain antibody has a CDR1 and a CDR2 having amino acid sequences of the CDR1 and the CDR2 as set forth in SEQ ID NO: 4. In some embodiments, the single domain antibody has a CDR1 and a CDR3 having amino acid sequences of the CDR1 and the CDR3 as set forth in SEQ ID NO: 4. In some embodiments, the single domain antibody has a CDR2 and a CDR3 having amino acid sequences of the CDR2 and the CDR3 as set forth in SEQ ID NO: 4. In some embodiments, the single domain antibody has a CDR1, a CDR2, and a CDR3 having amino acid sequences of the CDR1, the CDR2, and the CDR3 as set forth in SEQ ID NO: 4. CDR sequences can be determined according to well-known numbering systems, e.g., as described in Table 1 above. In some embodiments, the CDRs are according to IMGT numbering. In some embodiments, the CDRs are according to Kabat numbering. In some embodiments, the CDRs are according to AbM numbering. In other embodiments, the CDRs are according to Chothia numbering. In other embodiments, the CDRs are according to Contact numbering. In other embodiments, the CDRs are according to a combination of Kabat numbering and Chothia numbering. In some embodiments, the anti-plgR single domain antibody is camelid. In some embodiments, the anti-plgR single domain antibody is humanized. In some embodiments, the anti-plgR single domain antibody comprises an acceptor human framework, e.g., a human immunoglobulin framework or a human consensus framework.

[0294] In some embodiments, the single domain antibody has a CDR1 having an amino acid sequence of the CDR1 as set forth in SEQ ID NO: 5. In some embodiments, the single domain antibody has a CDR2 having an amino acid sequence of the CDR2 as set forth in SEQ ID NO: 5. In other embodiments, the single domain antibody has a CDR3 having an amino acid sequence of the CDR3 as set forth in SEQ ID NO: 5. In some embodiments, the single domain antibody has a CDR1 and a CDR2 having amino acid sequences of the CDR1 and the CDR2 as set forth in SEQ ID NO: 5. In some embodiments, the single domain antibody has a CDR1 and a CDR3 having amino acid sequences of the CDR1 and the CDR3 as set forth in SEQ ID NO: 5. In some embodiments, the single domain antibody has a CDR2 and a CDR3 having amino acid sequences of the CDR2 and the CDR3 as set forth in SEQ ID NO: 5. In some embodiments, the single domain antibody has a CDR1, a CDR2, and a CDR3 having amino acid sequences of the CDR1, the CDR2, and the CDR3 as set forth in SEQ ID NO: 5. CDR sequences can be determined according to well-known numbering systems, e.g., as described in Table 1 above. In some embodiments, the CDRs are according to IMGT numbering. In some embodiments, the CDRs are according to Kabat numbering. In some embodiments, the CDRs are according to AbM numbering. In other embodiments, the CDRs are according to Chothia numbering. In other embodiments, the CDRs are according to Contact numbering. In other embodiments, the CDRs are according to a combination of Kabat numbering and Chothia numbering. In some embodiments, the anti-plgR single domain antibody is camelid. In some embodiments, the anti-plgR single domain antibody is humanized. In some embodiments, the anti-plgR single domain antibody comprises an acceptor human framework, e.g., a human immunoglobulin framework or a human consensus framework.

[0295] In some embodiments, the single domain antibody has a CDR1 having an amino acid sequence of the CDR1 as set forth in SEQ ID NO: 6. In some embodiments, the single domain antibody has a CDR2 having an amino acid sequence of the CDR2 as set forth in SEQ ID NO: 6. In other embodiments, the single domain antibody has a CDR3 having an amino acid sequence of the CDR3 as set forth in SEQ ID NO: 6. In some embodiments, the single domain antibody has a CDR1 and a CDR2 having amino acid sequences of the CDR1 and the CDR2 as set forth in SEQ ID NO: 6. In some embodiments, the single domain antibody has a CDR1 and a CDR3 having amino acid sequences of the CDR1 and the CDR3 as set forth in SEQ ID NO: 6. In some embodiments, the single domain antibody has a CDR2 and a CDR3 having amino acid sequences of the CDR2 and the CDR3 as set forth in SEQ ID NO: 6. In some embodiments, the single domain antibody has a CDR1, a CDR2, and a CDR3 having amino acid sequences of the CDR1, the CDR2, and the CDR3 as set forth in SEQ ID NO: 6. CDR sequences can be determined according to well-known numbering systems, e.g., as described in Table 1 above. In some embodiments, the CDRs are according to IMGT numbering. In some embodiments, the CDRs are according to Kabat numbering. In some embodiments, the CDRs are according to AbM numbering. In other embodiments, the CDRs are according to Chothia numbering. In other embodiments, the CDRs are according to Contact numbering. In other embodiments, the CDRs are according to a combination of Kabat numbering and Chothia numbering. In some embodiments, the anti-plgR single domain antibody is camelid. In some embodiments, the anti-plgR single domain antibody is humanized. In some embodiments, the anti-plgR single domain antibody comprises an acceptor human framework, e.g., a human immunoglobulin framework or a human consensus framework.

[0296] In some embodiments, the single domain antibody has a CDR1 having an amino acid sequence of the CDR1 as set forth in SEQ ID NO: 7. In some embodiments, the single domain antibody has a CDR2 having an amino acid sequence of the CDR2 as set forth in SEQ ID NO: 7. In other embodiments, the single domain antibody has a CDR3 having an amino acid sequence of the CDR3 as set forth in SEQ ID NO: 7. In some embodiments, the single domain antibody has a CDR1 and a CDR2 having amino acid sequences of the CDR1 and the CDR2 as set forth in SEQ ID NO: 7. In some embodiments, the single domain antibody has a CDR1 and a CDR3 having amino acid sequences of the CDR1 and the CDR3 as set forth in SEQ ID NO: 7. In some embodiments, the single domain antibody has a CDR2 and a CDR3 having amino acid sequences of the CDR2 and the CDR3 as set forth in SEQ ID NO: 7. In some embodiments, the single domain antibody has a CDR1, a CDR2, and a CDR3 having amino acid sequences of the CDR1, the CDR2, and the CDR3 as set forth in SEQ ID NO: 7. CDR sequences can be determined according to well-known numbering systems, e.g., as described in Table 1 above. In some embodiments, the CDRs are according to IMGT numbering. In some embodiments, the CDRs are according to Kabat numbering. In some embodiments, the CDRs are according to AbM numbering. In other embodiments, the CDRs are according to Chothia numbering. In other embodiments, the CDRs are according to Contact numbering. In other embodiments, the CDRs are according to a combination of Kabat numbering and Chothia numbering. In some embodiments, the anti-plgR single domain antibody is camelid. In some embodiments, the anti-plgR single domain antibody is humanized. In some embodiments, the anti-plgR single domain antibody comprises an acceptor human framework, e.g., a human immunoglobulin framework or a human consensus framework.

[0297] In some embodiments, the single domain antibody has a CDR1 having an amino acid sequence of the CDR1 as set forth in SEQ ID NO: 8. In some embodiments, the single domain antibody has a CDR2 having an amino acid sequence of the CDR2 as set forth in SEQ ID NO: 8. In other embodiments, the single domain antibody has a CDR3 having an amino acid sequence of the CDR3 as set forth in SEQ ID NO: 8. In some embodiments, the single domain antibody has a CDR1 and a CDR2 having amino acid sequences of the CDR1 and the CDR2 as set forth in SEQ ID NO: 8. In some embodiments, the single domain antibody has a CDR1 and a CDR3 having amino acid sequences of the CDR1 and the CDR3 as set forth in SEQ ID NO: 8. In some embodiments, the single domain antibody has a CDR2 and a CDR3 having amino acid sequences of the CDR2 and the CDR3 as set forth in SEQ ID NO: 8. In some embodiments, the single domain antibody has a CDR1, a CDR2, and a CDR3 having amino acid sequences of the CDR1, the CDR2, and the CDR3 as set forth in SEQ ID NO: 8. CDR sequences can be determined according to well-known numbering systems, e.g., as described in Table 1 above. In some embodiments, the CDRs are according to IMGT numbering. In some embodiments, the CDRs are according to Kabat numbering. In some embodiments, the CDRs are according to AbM numbering. In other embodiments, the CDRs are according to Chothia numbering. In other embodiments, the CDRs are according to Contact numbering. In other embodiments, the CDRs are according to a combination of Kabat numbering and Chothia numbering. In some embodiments, the anti-plgR single domain antibody is camelid. In some embodiments, the anti-plgR single domain antibody is humanized. In some embodiments, the anti-plgR single domain antibody comprises an acceptor human framework, e.g., a human immunoglobulin framework or a human consensus framework.

[0298] In some embodiments, the single domain antibody has a CDR1 having an amino acid sequence of the CDR1 as set forth in SEQ ID NO: 9. In some embodiments, the single domain antibody has a CDR2 having an amino acid sequence of the CDR2 as set forth in SEQ ID NO: 9. In other embodiments, the single domain antibody has a CDR3 having an amino acid sequence of the CDR3 as set forth in SEQ ID NO: 9. In some embodiments, the single domain antibody has a CDR1 and a CDR2 having amino acid sequences of the CDR1 and the CDR2 as set forth in SEQ ID NO: 9. In some embodiments, the single domain antibody has a CDR1 and a CDR3 having amino acid sequences of the CDR1 and the CDR3 as set forth in SEQ ID NO: 9. In some embodiments, the single domain antibody has a CDR2 and a CDR3 having amino acid sequences of the CDR2 and the CDR3 as set forth in SEQ ID NO: 9. In some embodiments, the single domain antibody has a CDR1, a CDR2, and a CDR3 having amino acid sequences of the CDR1, the CDR2, and the CDR3 as set forth in SEQ ID NO: 9. CDR sequences can be determined according to well-known numbering systems, e.g., as described in Table 1 above. In some embodiments, the CDRs are according to IMGT numbering. In some embodiments, the CDRs are according to Kabat numbering. In some embodiments, the CDRs are according to AbM numbering. In other embodiments, the CDRs are according to Chothia numbering. In other embodiments, the CDRs are according to Contact numbering. In other embodiments, the CDRs are according to a combination of Kabat numbering and Chothia numbering. In some embodiments, the anti-plgR single domain antibody is camelid. In some embodiments, the anti-plgR single domain antibody is humanized. In some embodiments, the anti-plgR single domain antibody comprises an acceptor human framework, e.g., a human immunoglobulin framework or a human consensus framework.

[0299] In some embodiments, the single domain antibody has a CDR1 having an amino acid sequence of the CDR1 as set forth in SEQ ID NO: 10. In some embodiments, the single domain antibody has a CDR2 having an amino acid sequence of the CDR2 as set forth in SEQ ID NO: 10. In other embodiments, the single domain antibody has a CDR3 having an amino acid sequence of the CDR3 as set forth in SEQ ID NO: 10. In some embodiments, the single domain antibody has a CDR1 and a CDR2 having amino acid sequences of the CDR1 and the CDR2 as set forth in SEQ ID NO: 10. In some embodiments, the single domain antibody has a CDR1 and a CDR3 having amino acid sequences of the CDR1 and the CDR3 as set forth in SEQ ID NO: 10. In some embodiments, the single domain antibody has a CDR2 and a CDR3 having amino acid sequences of the CDR2 and the CDR3 as set forth in SEQ ID NO: 10. In some embodiments, the single domain antibody has a CDR1, a CDR2, and a CDR3 having amino acid sequences of the CDR1, the CDR2, and the CDR3 as set forth in SEQ ID NO: 10. CDR sequences can be determined according to well-known numbering systems, e.g., as described in Table 1 above. In some embodiments, the CDRs are according to IMGT numbering. In some embodiments, the CDRs are according to Kabat numbering. In some embodiments, the CDRs are according to AbM numbering. In other embodiments, the CDRs are according to Chothia numbering. In other embodiments, the CDRs are according to Contact numbering. In other embodiments, the CDRs are according to a combination of Kabat numbering and Chothia numbering. In some embodiments, the anti-plgR single domain antibody is camelid. In some embodiments, the anti-plgR single domain antibody is humanized. In some embodiments, the anti-plgR single domain antibody comprises an acceptor human framework, e.g., a human immunoglobulin framework or a human consensus framework.

[0300] In some embodiments, the single domain antibody has a CDR1 having an amino acid sequence of the CDR1 as set forth in SEQ ID NO: 11. In some embodiments, the single domain antibody has a CDR2 having an amino acid sequence of the CDR2 as set forth in SEQ ID NO: 11. In other embodiments, the single domain antibody has a CDR3 having an amino acid sequence of the CDR3 as set forth in SEQ ID NO: 11. In some embodiments, the single domain antibody has a CDR1 and a CDR2 having amino acid sequences of the CDR1 and the CDR2 as set forth in SEQ ID NO: 11. In some embodiments, the single domain antibody has a CDR1 and a CDR3 having amino acid sequences of the CDR1 and the CDR3 as set forth in SEQ ID NO: 11. In some embodiments, the single domain antibody has a CDR2 and a CDR3 having amino acid sequences of the CDR2 and the CDR3 as set forth in SEQ ID NO: 11. In some embodiments, the single domain antibody has a CDR1, a CDR2, and a CDR3 having amino acid sequences of the CDR1, the CDR2, and the CDR3 as set forth in SEQ ID NO: 11. CDR sequences can be determined according to well-known numbering systems, e.g., as described in Table 1 above. In some embodiments, the CDRs are according to IMGT numbering. In some embodiments, the CDRs are according to Kabat numbering. In some embodiments, the CDRs are according to AbM numbering. In other embodiments, the CDRs are according to Chothia numbering. In other embodiments, the CDRs are according to Contact numbering. In other embodiments, the CDRs are according to a combination of Kabat numbering and Chothia numbering. In some embodiments, the anti-plgR single domain antibody is camelid. In some embodiments, the anti-plgR single domain antibody is humanized. In some embodiments, the anti-plgR single domain antibody comprises an acceptor human framework, e.g., a human immunoglobulin framework or a human consensus framework.

[0301] In some embodiments, the single domain antibody has a CDR1 having an amino acid sequence of the CDR1 as set forth in SEQ ID NO: 12. In some embodiments, the single domain antibody has a CDR2 having an amino acid sequence of the CDR2 as set forth in SEQ ID NO: 12. In other embodiments, the single domain antibody has a CDR3 having an amino acid sequence of the CDR3 as set forth in SEQ ID NO: 12. In some embodiments, the single domain antibody has a CDR1 and a CDR2 having amino acid sequences of the CDR1 and the CDR2 as set forth in SEQ ID NO: 12. In some embodiments, the single domain antibody has a CDR1 and a CDR3 having amino acid sequences of the CDR1 and the CDR3 as set forth in SEQ ID NO: 12. In some embodiments, the single domain antibody has a CDR2 and a CDR3 having amino acid sequences of the CDR2 and the CDR3 as set forth in SEQ ID NO: 12. In some embodiments, the single domain antibody has a CDR1, a CDR2, and a CDR3 having amino acid sequences of the CDR1, the CDR2, and the CDR3 as set forth in SEQ ID NO: 12. CDR sequences can be determined according to well-known numbering systems, e.g., as described in Table 1 above. In some embodiments, the CDRs are according to IMGT numbering. In some embodiments, the CDRs are according to Kabat numbering. In some embodiments, the CDRs are according to AbM numbering. In other embodiments, the CDRs are according to Chothia numbering. In other embodiments, the CDRs are according to Contact numbering. In other embodiments, the CDRs are according to a combination of Kabat numbering and Chothia numbering. In some embodiments, the anti-plgR single domain antibody is camelid. In some embodiments, the anti-plgR single domain antibody is humanized. In some embodiments, the anti-plgR single domain antibody comprises an acceptor human framework, e.g., a human immunoglobulin framework or a human consensus framework.

[0302] In some embodiments, the single domain antibody has a CDR1 having an amino acid sequence of the CDR1 as set forth in SEQ ID NO: 13. In some embodiments, the single domain antibody has a CDR2 having an amino acid sequence of the CDR2 as set forth in SEQ ID NO: 13. In other embodiments, the single domain antibody has a CDR3 having an amino acid sequence of the CDR3 as set forth in SEQ ID NO: 13. In some embodiments, the single domain antibody has a CDR1 and a CDR2 having amino acid sequences of the CDR1 and the CDR2 as set forth in SEQ ID NO: 13. In some embodiments, the single domain antibody has a CDR1 and a CDR3 having amino acid sequences of the CDR1 and the CDR3 as set forth in SEQ ID NO: 13. In some embodiments, the single domain antibody has a CDR2 and a CDR3 having amino acid sequences of the CDR2 and the CDR3 as set forth in SEQ ID NO: 13. In some embodiments, the single domain antibody has a CDR1, a CDR2, and a CDR3 having amino acid sequences of the CDR1, the CDR2, and the CDR3 as set forth in SEQ ID NO: 13. CDR sequences can be determined according to well-known numbering systems, e.g., as described in Table 1 above. In some embodiments, the CDRs are according to IMGT numbering. In some embodiments, the CDRs are according to Kabat numbering. In some embodiments, the CDRs are according to AbM numbering. In other embodiments, the CDRs are according to Chothia numbering. In other embodiments, the CDRs are according to Contact numbering. In other embodiments, the CDRs are according to a combination of Kabat numbering and Chothia numbering. In some embodiments, the anti-plgR single domain antibody is camelid. In some embodiments, the anti-plgR single domain antibody is humanized. In some embodiments, the anti-plgR single domain antibody comprises an acceptor human framework, e.g., a human immunoglobulin framework or a human consensus framework.

[0303] In some embodiments, the single domain antibody has a CDR1 having an amino acid sequence of the CDR1 as set forth in SEQ ID NO: 14. In some embodiments, the single domain antibody has a CDR2 having an amino acid sequence of the CDR2 as set forth in SEQ ID NO: 14. In other embodiments, the single domain antibody has a CDR3 having an amino acid sequence of the CDR3 as set forth in SEQ ID NO: 14. In some embodiments, the single domain antibody has a CDR1 and a CDR2 having amino acid sequences of the CDR1 and the CDR2 as set forth in SEQ ID NO: 14. In some embodiments, the single domain antibody has a CDR1 and a CDR3 having amino acid sequences of the CDR1 and the CDR3 as set forth in SEQ ID NO: 14. In some embodiments, the single domain antibody has a CDR2 and a CDR3 having amino acid sequences of the CDR2 and the CDR3 as set forth in SEQ ID NO: 14. In some embodiments, the single domain antibody has a CDR1, a CDR2, and a CDR3 having amino acid sequences of the CDR1, the CDR2, and the CDR3 as set forth in SEQ ID NO: 14. CDR sequences can be determined according to well-known numbering systems, e.g., as described in Table 1 above. In some embodiments, the CDRs are according to IMGT numbering. In some embodiments, the CDRs are according to Kabat numbering. In some embodiments, the CDRs are according to AbM numbering. In other embodiments, the CDRs are according to Chothia numbering. In other embodiments, the CDRs are according to Contact numbering. In other embodiments, the CDRs are according to a combination of Kabat numbering and Chothia numbering. In some embodiments, the anti-plgR single domain antibody is camelid. In some embodiments, the anti-plgR single domain antibody is humanized. In some embodiments, the anti-plgR single domain antibody comprises an acceptor human framework, e.g., a human immunoglobulin framework or a human consensus framework.

[0304] In some embodiments, the single domain antibody has a CDR1 having an amino acid sequence of the CDR1 as set forth in SEQ ID NO: 15. In some embodiments, the single domain antibody has a CDR2 having an amino acid sequence of the CDR2 as set forth in SEQ ID NO: 15. In other embodiments, the single domain antibody has a CDR3 having an amino acid sequence of the CDR3 as set forth in SEQ ID NO: 15. In some embodiments, the single domain antibody has a CDR1 and a CDR2 having amino acid sequences of the CDR1 and the CDR2 as set forth in SEQ ID NO: 15. In some embodiments, the single domain antibody has a CDR1 and a CDR3 having amino acid sequences of the CDR1 and the CDR3 as set forth in SEQ ID NO: 15. In some embodiments, the single domain antibody has a CDR2 and a CDR3 having amino acid sequences of the CDR2 and the CDR3 as set forth in SEQ ID NO: 15. In some embodiments, the single domain antibody has a CDR1, a CDR2, and a CDR3 having amino acid sequences of the CDR1, the CDR2, and the CDR3 as set forth in SEQ ID NO: 15. CDR sequences can be determined according to well-known numbering systems, e.g., as described in Table 1 above. In some embodiments, the CDRs are according to IMGT numbering. In some embodiments, the CDRs are according to Kabat numbering. In some embodiments, the CDRs are according to AbM numbering. In other embodiments, the CDRs are according to Chothia numbering. In other embodiments, the CDRs are according to Contact numbering. In other embodiments, the CDRs are according to a combination of Kabat numbering and Chothia numbering. In some embodiments, the anti-plgR single domain antibody is camelid. In some embodiments, the anti-plgR single domain antibody is humanized. In some embodiments, the anti-plgR single domain antibody comprises an acceptor human framework, e.g., a human immunoglobulin framework or a human consensus framework.

[0305] In some embodiments, the single domain antibody has a CDR1 having an amino acid sequence of the CDR1 as set forth in SEQ ID NO: 16. In some embodiments, the single domain antibody has a CDR2 having an amino acid sequence of the CDR2 as set forth in SEQ ID NO: 16. In other embodiments, the single domain antibody has a CDR3 having an amino acid sequence of the CDR3 as set forth in SEQ ID NO: 16. In some embodiments, the single domain antibody has a CDR1 and a CDR2 having amino acid sequences of the CDR1 and the CDR2 as set forth in SEQ ID NO: 16. In some embodiments, the single domain antibody has a CDR1 and a CDR3 having amino acid sequences of the CDR1 and the CDR3 as set forth in SEQ ID NO: 16. In some embodiments, the single domain antibody has a CDR2 and a CDR3 having amino acid sequences of the CDR2 and the CDR3 as set forth in SEQ ID NO: 16. In some embodiments, the single domain antibody has a CDR1, a CDR2, and a CDR3 having amino acid sequences of the CDR1, the CDR2, and the CDR3 as set forth in SEQ ID NO: 16. CDR sequences can be determined according to well-known numbering systems, e.g., as described in Table 1 above. In some embodiments, the CDRs are according to IMGT numbering. In some embodiments, the CDRs are according to Kabat numbering. In some embodiments, the CDRs are according to AbM numbering. In other embodiments, the CDRs are according to Chothia numbering. In other embodiments, the CDRs are according to Contact numbering. In other embodiments, the CDRs are according to a combination of Kabat numbering and Chothia numbering. In some embodiments, the anti-plgR single domain antibody is camelid. In some embodiments, the anti-plgR single domain antibody is humanized. In some embodiments, the anti-plgR single domain antibody comprises an acceptor human framework, e.g., a human immunoglobulin framework or a human consensus framework.

[0306] In some embodiments, the single domain antibody has a CDR1 having an amino acid sequence of the CDR1 as set forth in SEQ ID NO: 17. In some embodiments, the single domain antibody has a CDR2 having an amino acid sequence of the CDR2 as set forth in SEQ ID NO: 17. In other embodiments, the single domain antibody has a CDR3 having an amino acid sequence of the CDR3 as set forth in SEQ ID NO: 17. In some embodiments, the single domain antibody has a CDR1 and a CDR2 having amino acid sequences of the CDR1 and the CDR2 as set forth in SEQ ID NO: 17. In some embodiments, the single domain antibody has a CDR1 and a CDR3 having amino acid sequences of the CDR1 and the CDR3 as set forth in SEQ ID NO: 17. In some embodiments, the single domain antibody has a CDR2 and a CDR3 having amino acid sequences of the CDR2 and the CDR3 as set forth in SEQ ID NO: 17. In some embodiments, the single domain antibody has a CDR1, a CDR2, and a CDR3 having amino acid sequences of the CDR1, the CDR2, and the CDR3 as set forth in SEQ ID NO: 17. CDR sequences can be determined according to well-known numbering systems, e.g., as described in Table 1 above. In some embodiments, the CDRs are according to IMGT numbering. In some embodiments, the CDRs are according to Kabat numbering. In some embodiments, the CDRs are according to AbM numbering. In other embodiments, the CDRs are according to Chothia numbering. In other embodiments, the CDRs are according to Contact numbering. In other embodiments, the CDRs are according to a combination of Kabat numbering and Chothia numbering. In some embodiments, the anti-plgR single domain antibody is camelid. In some embodiments, the anti-plgR single domain antibody is humanized. In some embodiments, the anti-plgR single domain antibody comprises an acceptor human framework, e.g., a human immunoglobulin framework or a human consensus framework.

[0307] In some embodiments, the single domain antibody has a CDR1 having an amino acid sequence of the CDR1 as set forth in SEQ ID NO: 18. In some embodiments, the single domain antibody has a CDR2 having an amino acid sequence of the CDR2 as set forth in SEQ ID NO: 18. In other embodiments, the single domain antibody has a CDR3 having an amino acid sequence of the CDR3 as set forth in SEQ ID NO: 18. In some embodiments, the single domain antibody has a CDR1 and a CDR2 having amino acid sequences of the CDR1 and the CDR2 as set forth in SEQ ID NO: 18. In some embodiments, the single domain antibody has a CDR1 and a CDR3 having amino acid sequences of the CDR1 and the CDR3 as set forth in SEQ ID NO: 18. In some embodiments, the single domain antibody has a CDR2 and a CDR3 having amino acid sequences of the CDR2 and the CDR3 as set forth in SEQ ID NO: 18. In some embodiments, the single domain antibody has a CDR1, a CDR2, and a CDR3 having amino acid sequences of the CDR1, the CDR2, and the CDR3 as set forth in SEQ ID NO: 18. CDR sequences can be determined according to well-known numbering systems, e.g., as described in Table 1 above. In some embodiments, the CDRs are according to IMGT numbering. In some embodiments, the CDRs are according to Kabat numbering. In some embodiments, the CDRs are according to AbM numbering. In other embodiments, the CDRs are according to Chothia numbering. In other embodiments, the CDRs are according to Contact numbering. In other embodiments, the CDRs are according to a combination of Kabat numbering and Chothia numbering. In some embodiments, the anti-plgR single domain antibody is camelid. In some embodiments, the anti-plgR single domain antibody is humanized. In some embodiments, the anti-plgR single domain antibody comprises an acceptor human framework, e.g., a human immunoglobulin framework or a human consensus framework.

[0308] In some embodiments, the single domain antibody has a CDR1 having an amino acid sequence of the CDR1 as set forth in SEQ ID NO: 19. In some embodiments, the single domain antibody has a CDR2 having an amino acid sequence of the CDR2 as set forth in SEQ ID NO: 19. In other embodiments, the single domain antibody has a CDR3 having an amino acid sequence of the CDR3 as set forth in SEQ ID NO: 19. In some embodiments, the single domain antibody has a CDR1 and a CDR2 having amino acid sequences of the CDR1 and the CDR2 as set forth in SEQ ID NO: 19. In some embodiments, the single domain antibody has a CDR1 and a CDR3 having amino acid sequences of the CDR1 and the CDR3 as set forth in SEQ ID NO: 19. In some embodiments, the single domain antibody has a CDR2 and a CDR3 having amino acid sequences of the CDR2 and the CDR3 as set forth in SEQ ID NO: 19. In some embodiments, the single domain antibody has a CDR1, a CDR2, and a CDR3 having amino acid sequences of the CDR1, the CDR2, and the CDR3 as set forth in SEQ ID NO: 19. CDR sequences can be determined according to well-known numbering systems, e.g., as described in Table 1 above. In some embodiments, the CDRs are according to IMGT numbering. In some embodiments, the CDRs are according to Kabat numbering. In some embodiments, the CDRs are according to AbM numbering. In other embodiments, the CDRs are according to Chothia numbering. In other embodiments, the CDRs are according to Contact numbering. In other embodiments, the CDRs are according to a combination of Kabat numbering and Chothia numbering. In some embodiments, the anti-plgR single domain antibody is camelid. In some embodiments, the anti-plgR single domain antibody is humanized. In some embodiments, the anti-plgR single domain antibody comprises an acceptor human framework, e.g., a human immunoglobulin framework or a human consensus framework.

[0309] In some embodiments, the single domain antibody has a CDR1 having an amino acid sequence of the CDR1 as set forth in SEQ ID NO: 20. In some embodiments, the single domain antibody has a CDR2 having an amino acid sequence of the CDR2 as set forth in SEQ ID NO: 20. In other embodiments, the single domain antibody has a CDR3 having an amino acid sequence of the CDR3 as set forth in SEQ ID NO: 20. In some embodiments, the single domain antibody has a CDR1 and a CDR2 having amino acid sequences of the CDR1 and the CDR2 as set forth in SEQ ID NO: 20. In some embodiments, the single domain antibody has a CDR1 and a CDR3 having amino acid sequences of the CDR1 and the CDR3 as set forth in SEQ ID NO: 20. In some embodiments, the single domain antibody has a CDR2 and a CDR3 having amino acid sequences of the CDR2 and the CDR3 as set forth in SEQ ID NO: 20. In some embodiments, the single domain antibody has a CDR1, a CDR2, and a CDR3 having amino acid sequences of the CDR1, the CDR2, and the CDR3 as set forth in SEQ ID NO: 20. CDR sequences can be determined according to well-known numbering systems, e.g., as described in Table 1 above. In some embodiments, the CDRs are according to IMGT numbering. In some embodiments, the CDRs are according to Kabat numbering. In some embodiments, the CDRs are according to AbM numbering. In other embodiments, the CDRs are according to Chothia numbering. In other embodiments, the CDRs are according to Contact numbering. In other embodiments, the CDRs are according to a combination of Kabat numbering and Chothia numbering. In some embodiments, the anti-plgR single domain antibody is camelid. In some embodiments, the anti-plgR single domain antibody is humanized. In some embodiments, the anti-plgR single domain antibody comprises an acceptor human framework, e.g., a human immunoglobulin framework or a human consensus framework.

[0310] In some embodiments, the single domain antibody has a CDR1 having an amino acid sequence of the CDR1 as set forth in SEQ ID NO: 21. In some embodiments, the single domain antibody has a CDR2 having an amino acid sequence of the CDR2 as set forth in SEQ ID NO: 21. In other embodiments, the single domain antibody has a CDR3 having an amino acid sequence of the CDR3 as set forth in SEQ ID NO: 21. In some embodiments, the single domain antibody has a CDR1 and a CDR2 having amino acid sequences of the CDR1 and the CDR2 as set forth in SEQ ID NO: 21. In some embodiments, the single domain antibody has a CDR1 and a CDR3 having amino acid sequences of the CDR1 and the CDR3 as set forth in SEQ ID NO: 21. In some embodiments, the single domain antibody has a CDR2 and a CDR3 having amino acid sequences of the CDR2 and the CDR3 as set forth in SEQ ID NO: 21. In some embodiments, the single domain antibody has a CDR1, a CDR2, and a CDR3 having amino acid sequences of the CDR1, the CDR2, and the CDR3 as set forth in SEQ ID NO: 21. CDR sequences can be determined according to well-known numbering systems, e.g., as described in Table 1 above. In some embodiments, the CDRs are according to IMGT numbering. In some embodiments, the CDRs are according to Kabat numbering. In some embodiments, the CDRs are according to AbM numbering. In other embodiments, the CDRs are according to Chothia numbering. In other embodiments, the CDRs are according to Contact numbering. In other embodiments, the CDRs are according to a combination of Kabat numbering and Chothia numbering. In some embodiments, the anti-plgR single domain antibody is camelid. In some embodiments, the anti-plgR single domain antibody is humanized. In some embodiments, the anti-plgR single domain antibody comprises an acceptor human framework, e.g., a human immunoglobulin framework or a human consensus framework.

[0311] In some embodiments, the single domain antibody has a CDR1 having an amino acid sequence of the CDR1 as set forth in SEQ ID NO: 22. In some embodiments, the single domain antibody has a CDR2 having an amino acid sequence of the CDR2 as set forth in SEQ ID NO: 22. In other embodiments, the single domain antibody has a CDR3 having an amino acid sequence of the CDR3 as set forth in SEQ ID NO: 22. In some embodiments, the single domain antibody has a CDR1 and a CDR2 having amino acid sequences of the CDR1 and the CDR2 as set forth in SEQ ID NO: 22. In some embodiments, the single domain antibody has a CDR1 and a CDR3 having amino acid sequences of the CDR1 and the CDR3 as set forth in SEQ ID NO: 22. In some embodiments, the single domain antibody has a CDR2 and a CDR3 having amino acid sequences of the CDR2 and the CDR3 as set forth in SEQ ID NO: 22. In some embodiments, the single domain antibody has a CDR1, a CDR2, and a CDR3 having amino acid sequences of the CDR1, the CDR2, and the CDR3 as set forth in SEQ ID NO: 22. CDR sequences can be determined according to well-known numbering systems, e.g., as described in Table 1 above. In some embodiments, the CDRs are according to IMGT numbering. In some embodiments, the CDRs are according to Kabat numbering. In some embodiments, the CDRs are according to AbM numbering. In other embodiments, the CDRs are according to Chothia numbering. In other embodiments, the CDRs are according to Contact numbering. In other embodiments, the CDRs are according to a combination of Kabat numbering and Chothia numbering. In some embodiments, the anti-plgR single domain antibody is camelid. In some embodiments, the anti-plgR single domain antibody is humanized. In some embodiments, the anti-plgR single domain antibody comprises an acceptor human framework, e.g., a human immunoglobulin framework or a human consensus framework.

[0312] In some embodiments, the single domain antibody has a CDR1 having an amino acid sequence of the CDR1 as set forth in SEQ ID NO: 23. In some embodiments, the single domain antibody has a CDR2 having an amino acid sequence of the CDR2 as set forth in SEQ ID NO: 23. In other embodiments, the single domain antibody has a CDR3 having an amino acid sequence of the CDR3 as set forth in SEQ ID NO: 23. In some embodiments, the single domain antibody has a CDR1 and a CDR2 having amino acid sequences of the CDR1 and the CDR2 as set forth in SEQ ID NO: 23. In some embodiments, the single domain antibody has a CDR1 and a CDR3 having amino acid sequences of the CDR1 and the CDR3 as set forth in SEQ ID NO: 23. In some embodiments, the single domain antibody has a CDR2 and a CDR3 having amino acid sequences of the CDR2 and the CDR3 as set forth in SEQ ID NO: 23. In some embodiments, the single domain antibody has a CDR1, a CDR2, and a CDR3 having amino acid sequences of the CDR1, the CDR2, and the CDR3 as set forth in SEQ ID NO: 23. CDR sequences can be determined according to well-known numbering systems, e.g., as described in Table 1 above. In some embodiments, the CDRs are according to IMGT numbering. In some embodiments, the CDRs are according to Kabat numbering. In some embodiments, the CDRs are according to AbM numbering. In other embodiments, the CDRs are according to Chothia numbering. In other embodiments, the CDRs are according to Contact numbering. In other embodiments, the CDRs are according to a combination of Kabat numbering and Chothia numbering. In some embodiments, the anti-plgR single domain antibody is camelid. In some embodiments, the anti-plgR single domain antibody is humanized. In some embodiments, the anti-plgR single domain antibody comprises an acceptor human framework, e.g., a human immunoglobulin framework or a human consensus framework.

[0313] In some embodiments, the single domain antibody has a CDR1 having an amino acid sequence of the CDR1 as set forth in SEQ ID NO: 24. In some embodiments, the single domain antibody has a CDR2 having an amino acid sequence of the CDR2 as set forth in SEQ ID NO: 24. In other embodiments, the single domain antibody has a CDR3 having an amino acid sequence of the CDR3 as set forth in SEQ ID NO: 24. In some embodiments, the single domain antibody has a CDR1 and a CDR2 having amino acid sequences of the CDR1 and the CDR2 as set forth in SEQ ID NO: 24. In some embodiments, the single domain antibody has a CDR1 and a CDR3 having amino acid sequences of the CDR1 and the CDR3 as set forth in SEQ ID NO: 24. In some embodiments, the single domain antibody has a CDR2 and a CDR3 having amino acid sequences of the CDR2 and the CDR3 as set forth in SEQ ID NO: 24. In some embodiments, the single domain antibody has a CDR1, a CDR2, and a CDR3 having amino acid sequences of the CDR1, the CDR2, and the CDR3 as set forth in SEQ ID NO: 24. CDR sequences can be determined according to well-known numbering systems, e.g., as described in Table 1 above. In some embodiments, the CDRs are according to IMGT numbering. In some embodiments, the CDRs are according to Kabat numbering. In some embodiments, the CDRs are according to AbM numbering. In other embodiments, the CDRs are according to Chothia numbering. In other embodiments, the CDRs are according to Contact numbering. In other embodiments, the CDRs are according to a combination of Kabat numbering and Chothia numbering. In some embodiments, the anti-plgR single domain antibody is camelid. In some embodiments, the anti-plgR single domain antibody is humanized. In some embodiments, the anti-plgR single domain antibody comprises an acceptor human framework, e.g., a human immunoglobulin framework or a human consensus framework.

[0314] In some embodiments, the single domain antibody has a CDR1 having an amino acid sequence of the CDR1 as set forth in SEQ ID NO: 25. In some embodiments, the single domain antibody has a CDR2 having an amino acid sequence of the CDR2 as set forth in SEQ ID NO: 25. In other embodiments, the single domain antibody has a CDR3 having an amino acid sequence of the CDR3 as set forth in SEQ ID NO: 25. In some embodiments, the single domain antibody has a CDR1 and a CDR2 having amino acid sequences of the CDR1 and the CDR2 as set forth in SEQ ID NO: 25. In some embodiments, the single domain antibody has a CDR1 and a CDR3 having amino acid sequences of the CDR1 and the CDR3 as set forth in SEQ ID NO: 25. In some embodiments, the single domain antibody has a CDR2 and a CDR3 having amino acid sequences of the CDR2 and the CDR3 as set forth in SEQ ID NO: 25. In some embodiments, the single domain antibody has a CDR1, a CDR2, and a CDR3 having amino acid sequences of the CDR1, the CDR2, and the CDR3 as set forth in SEQ ID NO: 25. CDR sequences can be determined according to well-known numbering systems, e.g., as described in Table 1 above. In some embodiments, the CDRs are according to IMGT numbering. In some embodiments, the CDRs are according to Kabat numbering. In some embodiments, the CDRs are according to AbM numbering. In other embodiments, the CDRs are according to Chothia numbering. In other embodiments, the CDRs are according to Contact numbering. In other embodiments, the CDRs are according to a combination of Kabat numbering and Chothia numbering. In some embodiments, the anti-plgR single domain antibody is camelid. In some embodiments, the anti-plgR single domain antibody is humanized. In some embodiments, the anti-plgR single domain antibody comprises an acceptor human framework, e.g., a human immunoglobulin framework or a human consensus framework.

[0315] In some embodiments, the single domain antibody has a CDR1 having an amino acid sequence of the CDR1 as set forth in SEQ ID NO: 26. In some embodiments, the single domain antibody has a CDR2 having an amino acid sequence of the CDR2 as set forth in SEQ ID NO: 26. In other embodiments, the single domain antibody has a CDR3 having an amino acid sequence of the CDR3 as set forth in SEQ ID NO: 26. In some embodiments, the single domain antibody has a CDR1 and a CDR2 having amino acid sequences of the CDR1 and the CDR2 as set forth in SEQ ID NO: 26. In some embodiments, the single domain antibody has a CDR1 and a CDR3 having amino acid sequences of the CDR1 and the CDR3 as set forth in SEQ ID NO: 26. In some embodiments, the single domain antibody has a CDR2 and a CDR3 having amino acid sequences of the CDR2 and the CDR3 as set forth in SEQ ID NO: 26. In some embodiments, the single domain antibody has a CDR1, a CDR2, and a CDR3 having amino acid sequences of the CDR1, the CDR2, and the CDR3 as set forth in SEQ ID NO: 26. CDR sequences can be determined according to well-known numbering systems, e.g., as described in Table 1 above. In some embodiments, the CDRs are according to IMGT numbering. In some embodiments, the CDRs are according to Kabat numbering. In some embodiments, the CDRs are according to AbM numbering. In other embodiments, the CDRs are according to Chothia numbering. In other embodiments, the CDRs are according to Contact numbering. In other embodiments, the CDRs are according to a combination of Kabat numbering and Chothia numbering. In some embodiments, the anti-plgR single domain antibody is camelid. In some embodiments, the anti-plgR single domain antibody is humanized. In some embodiments, the anti-plgR single domain antibody comprises an acceptor human framework, e.g., a human immunoglobulin framework or a human consensus framework.

[0316] In some embodiments, the single domain antibody has a CDR1 having an amino acid sequence of the CDR1 as set forth in SEQ ID NO: 27. In some embodiments, the single domain antibody has a CDR2 having an amino acid sequence of the CDR2 as set forth in SEQ ID NO: 27. In other embodiments, the single domain antibody has a CDR3 having an amino acid sequence of the CDR3 as set forth in SEQ ID NO: 27. In some embodiments, the single domain antibody has a CDR1 and a CDR2 having amino acid sequences of the CDR1 and the CDR2 as set forth in SEQ ID NO: 27. In some embodiments, the single domain antibody has a CDR1 and a CDR3 having amino acid sequences of the CDR1 and the CDR3 as set forth in SEQ ID NO: 27. In some embodiments, the single domain antibody has a CDR2 and a CDR3 having amino acid sequences of the CDR2 and the CDR3 as set forth in SEQ ID NO: 27. In some embodiments, the single domain antibody has a CDR1, a CDR2, and a CDR3 having amino acid sequences of the CDR1, the CDR2, and the CDR3 as set forth in SEQ ID NO: 27. CDR sequences can be determined according to well-known numbering systems, e.g., as described in Table 1 above. In some embodiments, the CDRs are according to IMGT numbering. In some embodiments, the CDRs are according to Kabat numbering. In some embodiments, the CDRs are according to AbM numbering. In other embodiments, the CDRs are according to Chothia numbering. In other embodiments, the CDRs are according to Contact numbering. In other embodiments, the CDRs are according to a combination of Kabat numbering and Chothia numbering. In some embodiments, the anti-plgR single domain antibody is camelid. In some embodiments, the anti-plgR single domain antibody is humanized. In some embodiments, the anti-plgR single domain antibody comprises an acceptor human framework, e.g., a human immunoglobulin framework or a human consensus framework.

[0317] In some embodiments, the single domain antibody has a CDR1 having an amino acid sequence of the CDR1 as set forth in SEQ ID NO: 28. In some embodiments, the single domain antibody has a CDR2 having an amino acid sequence of the CDR2 as set forth in SEQ ID NO: 28. In other embodiments, the single domain antibody has a CDR3 having an amino acid sequence of the CDR3 as set forth in SEQ ID NO: 28. In some embodiments, the single domain antibody has a CDR1 and a CDR2 having amino acid sequences of the CDR1 and the CDR2 as set forth in SEQ ID NO: 28. In some embodiments, the single domain antibody has a CDR1 and a CDR3 having amino acid sequences of the CDR1 and the CDR3 as set forth in SEQ ID NO: 28. In some embodiments, the single domain antibody has a CDR2 and a CDR3 having amino acid sequences of the CDR2 and the CDR3 as set forth in SEQ ID NO: 28. In some embodiments, the single domain antibody has a CDR1, a CDR2, and a CDR3 having amino acid sequences of the CDR1, the CDR2, and the CDR3 as set forth in SEQ ID NO: 28. CDR sequences can be determined according to well-known numbering systems, e.g., as described in Table 1 above. In some embodiments, the CDRs are according to IMGT numbering. In some embodiments, the CDRs are according to Kabat numbering. In some embodiments, the CDRs are according to AbM numbering. In other embodiments, the CDRs are according to Chothia numbering. In other embodiments, the CDRs are according to Contact numbering. In other embodiments, the CDRs are according to a combination of Kabat numbering and Chothia numbering. In some embodiments, the anti-plgR single domain antibody is camelid. In some embodiments, the anti-plgR single domain antibody is humanized. In some embodiments, the anti-plgR single domain antibody comprises an acceptor human framework, e.g., a human immunoglobulin framework or a human consensus framework.

[0318] In some embodiments, the single domain antibody has a CDR1 having an amino acid sequence of the CDR1 as set forth in SEQ ID NO: 29. In some embodiments, the single domain antibody has a CDR2 having an amino acid sequence of the CDR2 as set forth in SEQ ID NO: 29. In other embodiments, the single domain antibody has a CDR3 having an amino acid sequence of the CDR3 as set forth in SEQ ID NO: 29. In some embodiments, the single domain antibody has a CDR1 and a CDR2 having amino acid sequences of the CDR1 and the CDR2 as set forth in SEQ ID NO: 29. In some embodiments, the single domain antibody has a CDR1 and a CDR3 having amino acid sequences of the CDR1 and the CDR3 as set forth in SEQ ID NO: 29. In some embodiments, the single domain antibody has a CDR2 and a CDR3 having amino acid sequences of the CDR2 and the CDR3 as set forth in SEQ ID NO: 29. In some embodiments, the single domain antibody has a CDR1, a CDR2, and a CDR3 having amino acid sequences of the CDR1, the CDR2, and the CDR3 as set forth in SEQ ID NO: 29. CDR sequences can be determined according to well-known numbering systems, e.g., as described in Table 1 above. In some embodiments, the CDRs are according to IMGT numbering. In some embodiments, the CDRs are according to Kabat numbering. In some embodiments, the CDRs are according to AbM numbering. In other embodiments, the CDRs are according to Chothia numbering. In other embodiments, the CDRs are according to Contact numbering. In other embodiments, the CDRs are according to a combination of Kabat numbering and Chothia numbering. In some embodiments, the anti-plgR single domain antibody is camelid. In some embodiments, the anti-plgR single domain antibody is humanized. In some embodiments, the anti-plgR single domain antibody comprises an acceptor human framework, e.g., a human immunoglobulin framework or a human consensus framework.

[0319] In some embodiments, the single domain antibody has a CDR1 having an amino acid sequence of the CDR1 as set forth in SEQ ID NO: 30. In some embodiments, the single domain antibody has a CDR2 having an amino acid sequence of the CDR2 as set forth in SEQ ID NO: 30. In other embodiments, the single domain antibody has a CDR3 having an amino acid sequence of the CDR3 as set forth in SEQ ID NO: 30. In some embodiments, the single domain antibody has a CDR1 and a CDR2 having amino acid sequences of the CDR1 and the CDR2 as set forth in SEQ ID NO: 30. In some embodiments, the single domain antibody has a CDR1 and a CDR3 having amino acid sequences of the CDR1 and the CDR3 as set forth in SEQ ID NO: 30. In some embodiments, the single domain antibody has a CDR2 and a CDR3 having amino acid sequences of the CDR2 and the CDR3 as set forth in SEQ ID NO: 30. In some embodiments, the single domain antibody has a CDR1, a CDR2, and a CDR3 having amino acid sequences of the CDR1, the CDR2, and the CDR3 as set forth in SEQ ID NO: 30. CDR sequences can be determined according to well-known numbering systems, e.g., as described in Table 1 above. In some embodiments, the CDRs are according to IMGT numbering. In some embodiments, the CDRs are according to Kabat numbering. In some embodiments, the CDRs are according to AbM numbering. In other embodiments, the CDRs are according to Chothia numbering. In other embodiments, the CDRs are according to Contact numbering. In other embodiments, the CDRs are according to a combination of Kabat numbering and Chothia numbering. In some embodiments, the anti-plgR single domain antibody is camelid. In some embodiments, the anti-plgR single domain antibody is humanized. In some embodiments, the anti-plgR single domain antibody comprises an acceptor human framework, e.g., a human immunoglobulin framework or a human consensus framework.

[0320] In some embodiments, the single domain antibody has a CDR1 having an amino acid sequence of the CDR1 as set forth in SEQ ID NO: 31. In some embodiments, the single domain antibody has a CDR2 having an amino acid sequence of the CDR2 as set forth in SEQ ID NO: 31. In other embodiments, the single domain antibody has a CDR3 having an amino acid sequence of the CDR3 as set forth in SEQ ID NO: 31. In some embodiments, the single domain antibody has a CDR1 and a CDR2 having amino acid sequences of the CDR1 and the CDR2 as set forth in SEQ ID NO: 31. In some embodiments, the single domain antibody has a CDR1 and a CDR3 having amino acid sequences of the CDR1 and the CDR3 as set forth in SEQ ID NO: 31. In some embodiments, the single domain antibody has a CDR2 and a CDR3 having amino acid sequences of the CDR2 and the CDR3 as set forth in SEQ ID NO: 31. In some embodiments, the single domain antibody has a CDR1, a CDR2, and a CDR3 having amino acid sequences of the CDR1, the CDR2, and the CDR3 as set forth in SEQ ID NO: 31. CDR sequences can be determined according to well-known numbering systems, e.g., as described in Table 1 above. In some embodiments, the CDRs are according to IMGT numbering. In some embodiments, the CDRs are according to Kabat numbering. In some embodiments, the CDRs are according to AbM numbering. In other embodiments, the CDRs are according to Chothia numbering. In other embodiments, the CDRs are according to Contact numbering. In other embodiments, the CDRs are according to a combination of Kabat numbering and Chothia numbering. In some embodiments, the anti-plgR single domain antibody is camelid. In some embodiments, the anti-plgR single domain antibody is humanized. In some embodiments, the anti-plgR single domain antibody comprises an acceptor human framework, e.g., a human immunoglobulin framework or a human consensus framework.

[0321] In some embodiments, the single domain antibody has a CDR1 having an amino acid sequence of the CDR1 as set forth in SEQ ID NO: 32. In some embodiments, the single domain antibody has a CDR2 having an amino acid sequence of the CDR2 as set forth in SEQ ID NO: 32. In other embodiments, the single domain antibody has a CDR3 having an amino acid sequence of the CDR3 as set forth in SEQ ID NO: 32. In some embodiments, the single domain antibody has a CDR1 and a CDR2 having amino acid sequences of the CDR1 and the CDR2 as set forth in SEQ ID NO: 32. In some embodiments, the single domain antibody has a CDR1 and a CDR3 having amino acid sequences of the CDR1 and the CDR3 as set forth in SEQ ID NO: 32. In some embodiments, the single domain antibody has a CDR2 and a CDR3 having amino acid sequences of the CDR2 and the CDR3 as set forth in SEQ ID NO: 32. In some embodiments, the single domain antibody has a CDR1, a CDR2, and a CDR3 having amino acid sequences of the CDR1, the CDR2, and the CDR3 as set forth in SEQ ID NO: 32. CDR sequences can be determined according to well-known numbering systems, e.g., as described in Table 1 above. In some embodiments, the CDRs are according to IMGT numbering. In some embodiments, the CDRs are according to Kabat numbering. In some embodiments, the CDRs are according to AbM numbering. In other embodiments, the CDRs are according to Chothia numbering. In other embodiments, the CDRs are according to Contact numbering. In other embodiments, the CDRs are according to a combination of Kabat numbering and Chothia numbering. In some embodiments, the anti-plgR single domain antibody is camelid. In some embodiments, the anti-plgR single domain antibody is humanized. In some embodiments, the anti-plgR single domain antibody comprises an acceptor human framework, e.g., a human immunoglobulin framework or a human consensus framework.

[0322] In some embodiments, the single domain antibody has a CDR1 having an amino acid sequence of the CDR1 as set forth in SEQ ID NO: 33. In some embodiments, the single domain antibody has a CDR2 having an amino acid sequence of the CDR2 as set forth in SEQ ID NO: 33. In other embodiments, the single domain antibody has a CDR3 having an amino acid sequence of the CDR3 as set forth in SEQ ID NO: 33. In some embodiments, the single domain antibody has a CDR1 and a CDR2 having amino acid sequences of the CDR1 and the CDR2 as set forth in SEQ ID NO: 33. In some embodiments, the single domain antibody has a CDR1 and a CDR3 having amino acid sequences of the CDR1 and the CDR3 as set forth in SEQ ID NO: 33. In some embodiments, the single domain antibody has a CDR2 and a CDR3 having amino acid sequences of the CDR2 and the CDR3 as set forth in SEQ ID NO: 33. In some embodiments, the single domain antibody has a CDR1, a CDR2, and a CDR3 having amino acid sequences of the CDR1, the CDR2, and the CDR3 as set forth in SEQ ID NO: 33. CDR sequences can be determined according to well-known numbering systems, e.g., as described in Table 1 above. In some embodiments, the CDRs are according to IMGT numbering. In some embodiments, the CDRs are according to Kabat numbering. In some embodiments, the CDRs are according to AbM numbering. In other embodiments, the CDRs are according to Chothia numbering. In other embodiments, the CDRs are according to Contact numbering. In other embodiments, the CDRs are according to a combination of Kabat numbering and Chothia numbering. In some embodiments, the anti-plgR single domain antibody is camelid. In some embodiments, the anti-plgR single domain antibody is humanized. In some embodiments, the anti-plgR single domain antibody comprises an acceptor human framework, e.g., a human immunoglobulin framework or a human consensus framework.

[0323] In some embodiments, the single domain antibody has a CDR1 having an amino acid sequence of the CDR1 as set forth in SEQ ID NO: 34. In some embodiments, the single domain antibody has a CDR2 having an amino acid sequence of the CDR2 as set forth in SEQ ID NO: 34. In other embodiments, the single domain antibody has a CDR3 having an amino acid sequence of the CDR3 as set forth in SEQ ID NO: 34. In some embodiments, the single domain antibody has a CDR1 and a CDR2 having amino acid sequences of the CDR1 and the CDR2 as set forth in SEQ ID NO: 34. In some embodiments, the single domain antibody has a CDR1 and a CDR3 having amino acid sequences of the CDR1 and the CDR3 as set forth in SEQ ID NO: 34. In some embodiments, the single domain antibody has a CDR2 and a CDR3 having amino acid sequences of the CDR2 and the CDR3 as set forth in SEQ ID NO: 34. In some embodiments, the single domain antibody has a CDR1, a CDR2, and a CDR3 having amino acid sequences of the CDR1, the CDR2, and the CDR3 as set forth in SEQ ID NO: 34. CDR sequences can be determined according to well-known numbering systems, e.g., as described in Table 1 above. In some embodiments, the CDRs are according to IMGT numbering. In some embodiments, the CDRs are according to Kabat numbering. In some embodiments, the CDRs are according to AbM numbering. In other embodiments, the CDRs are according to Chothia numbering. In other embodiments, the CDRs are according to Contact numbering. In other embodiments, the CDRs are according to a combination of Kabat numbering and Chothia numbering. In some embodiments, the anti-plgR single domain antibody is camelid. In some embodiments, the anti-plgR single domain antibody is humanized. In some embodiments, the anti-plgR single domain antibody comprises an acceptor human framework, e.g., a human immunoglobulin framework or a human consensus framework.

[0324] In some embodiments, the single domain antibody has a CDR1 having an amino acid sequence of the CDR1 as set forth in SEQ ID NO: 35. In some embodiments, the single domain antibody has a CDR2 having an amino acid sequence of the CDR2 as set forth in SEQ ID NO: 35. In other embodiments, the single domain antibody has a CDR3 having an amino acid sequence of the CDR3 as set forth in SEQ ID NO: 35. In some embodiments, the single domain antibody has a CDR1 and a CDR2 having amino acid sequences of the CDR1 and the CDR2 as set forth in SEQ ID NO: 35. In some embodiments, the single domain antibody has a CDR1 and a CDR3 having amino acid sequences of the CDR1 and the CDR3 as set forth in SEQ ID NO: 35. In some embodiments, the single domain antibody has a CDR2 and a CDR3 having amino acid sequences of the CDR2 and the CDR3 as set forth in SEQ ID NO: 35. In some embodiments, the single domain antibody has a CDR1, a CDR2, and a CDR3 having amino acid sequences of the CDR1, the CDR2, and the CDR3 as set forth in SEQ ID NO: 35. CDR sequences can be determined according to well-known numbering systems, e.g., as described in Table 1 above. In some embodiments, the CDRs are according to IMGT numbering. In some embodiments, the CDRs are according to Kabat numbering. In some embodiments, the CDRs are according to AbM numbering. In other embodiments, the CDRs are according to Chothia numbering. In other embodiments, the CDRs are according to Contact numbering. In other embodiments, the CDRs are according to a combination of Kabat numbering and Chothia numbering. In some embodiments, the anti-plgR single domain antibody is camelid. In some embodiments, the anti-plgR single domain antibody is humanized. In some embodiments, the anti-plgR single domain antibody comprises an acceptor human framework, e.g., a human immunoglobulin framework or a human consensus framework.

[0325] In some embodiments, the single domain antibody has a CDR1 having an amino acid sequence of the CDR1 as set forth in SEQ ID NO: 36. In some embodiments, the single domain antibody has a CDR2 having an amino acid sequence of the CDR2 as set forth in SEQ ID NO: 36. In other embodiments, the single domain antibody has a CDR3 having an amino acid sequence of the CDR3 as set forth in SEQ ID NO: 36. In some embodiments, the single domain antibody has a CDR1 and a CDR2 having amino acid sequences of the CDR1 and the CDR2 as set forth in SEQ ID NO: 36. In some embodiments, the single domain antibody has a CDR1 and a CDR3 having amino acid sequences of the CDR1 and the CDR3 as set forth in SEQ ID NO: 36. In some embodiments, the single domain antibody has a CDR2 and a CDR3 having amino acid sequences of the CDR2 and the CDR3 as set forth in SEQ ID NO: 36. In some embodiments, the single domain antibody has a CDR1, a CDR2, and a CDR3 having amino acid sequences of the CDR1, the CDR2, and the CDR3 as set forth in SEQ ID NO: 36. CDR sequences can be determined according to well-known numbering systems, e.g., as described in Table 1 above. In some embodiments, the CDRs are according to IMGT numbering. In some embodiments, the CDRs are according to Kabat numbering. In some embodiments, the CDRs are according to AbM numbering. In other embodiments, the CDRs are according to Chothia numbering. In other embodiments, the CDRs are according to Contact numbering. In other embodiments, the CDRs are according to a combination of Kabat numbering and Chothia numbering. In some embodiments, the anti-plgR single domain antibody is camelid. In some embodiments, the anti-plgR single domain antibody is humanized. In some embodiments, the anti-plgR single domain antibody comprises an acceptor human framework, e.g., a human immunoglobulin framework or a human consensus framework.

[0326] In some embodiments, the single domain antibody has a CDR1 having an amino acid sequence of the CDR1 as set forth in SEQ ID NO: 37. In some embodiments, the single domain antibody has a CDR2 having an amino acid sequence of the CDR2 as set forth in SEQ ID NO: 37. In other embodiments, the single domain antibody has a CDR3 having an amino acid sequence of the CDR3 as set forth in SEQ ID NO: 37. In some embodiments, the single domain antibody has a CDR1 and a CDR2 having amino acid sequences of the CDR1 and the CDR2 as set forth in SEQ ID NO: 37. In some embodiments, the single domain antibody has a CDR1 and a CDR3 having amino acid sequences of the CDR1 and the CDR3 as set forth in SEQ ID NO: 37. In some embodiments, the single domain antibody has a CDR2 and a CDR3 having amino acid sequences of the CDR2 and the CDR3 as set forth in SEQ ID NO: 37. In some embodiments, the single domain antibody has a CDR1, a CDR2, and a CDR3 having amino acid sequences of the CDR1, the CDR2, and the CDR3 as set forth in SEQ ID NO: 37. CDR sequences can be determined according to well-known numbering systems, e.g., as described in Table 1 above. In some embodiments, the CDRs are according to IMGT numbering. In some embodiments, the CDRs are according to Kabat numbering. In some embodiments, the CDRs are according to AbM numbering. In other embodiments, the CDRs are according to Chothia numbering. In other embodiments, the CDRs are according to Contact numbering. In other embodiments, the CDRs are according to a combination of Kabat numbering and Chothia numbering. In some embodiments, the anti-plgR single domain antibody is camelid. In some embodiments, the anti-plgR single domain antibody is humanized. In some embodiments, the anti-plgR single domain antibody comprises an acceptor human framework, e.g., a human immunoglobulin framework or a human consensus framework.

[0327] In some embodiments, the single domain antibody has a CDR1 having an amino acid sequence of the CDR1 as set forth in SEQ ID NO: 38. In some embodiments, the single domain antibody has a CDR2 having an amino acid sequence of the CDR2 as set forth in SEQ ID NO: 38. In other embodiments, the single domain antibody has a CDR3 having an amino acid sequence of the CDR3 as set forth in SEQ ID NO: 38. In some embodiments, the single domain antibody has a CDR1 and a CDR2 having amino acid sequences of the CDR1 and the CDR2 as set forth in SEQ ID NO: 38. In some embodiments, the single domain antibody has a CDR1 and a CDR3 having amino acid sequences of the CDR1 and the CDR3 as set forth in SEQ ID NO: 38. In some embodiments, the single domain antibody has a CDR2 and a CDR3 having amino acid sequences of the CDR2 and the CDR3 as set forth in SEQ ID NO: 38. In some embodiments, the single domain antibody has a CDR1, a CDR2, and a CDR3 having amino acid sequences of the CDR1, the CDR2, and the CDR3 as set forth in SEQ ID NO: 38. CDR sequences can be determined according to well-known numbering systems, e.g., as described in Table 1 above. In some embodiments, the CDRs are according to IMGT numbering. In some embodiments, the CDRs are according to Kabat numbering. In some embodiments, the CDRs are according to AbM numbering. In other embodiments, the CDRs are according to Chothia numbering. In other embodiments, the CDRs are according to Contact numbering. In other embodiments, the CDRs are according to a combination of Kabat numbering and Chothia numbering. In some embodiments, the anti-plgR single domain antibody is camelid. In some embodiments, the anti-plgR single domain antibody is humanized. In some embodiments, the anti-plgR single domain antibody comprises an acceptor human framework, e.g., a human immunoglobulin framework or a human consensus framework.

[0328] In some embodiments, the single domain antibody has a CDR1 having an amino acid sequence of the CDR1 as set forth in SEQ ID NO: 39. In some embodiments, the single domain antibody has a CDR2 having an amino acid sequence of the CDR2 as set forth in SEQ ID NO: 39. In other embodiments, the single domain antibody has a CDR3 having an amino acid sequence of the CDR3 as set forth in SEQ ID NO: 39. In some embodiments, the single domain antibody has a CDR1 and a CDR2 having amino acid sequences of the CDR1 and the CDR2 as set forth in SEQ ID NO: 39. In some embodiments, the single domain antibody has a CDR1 and a CDR3 having amino acid sequences of the CDR1 and the CDR3 as set forth in SEQ ID NO: 39. In some embodiments, the single domain antibody has a CDR2 and a CDR3 having amino acid sequences of the CDR2 and the CDR3 as set forth in SEQ ID NO: 39. In some embodiments, the single domain antibody has a CDR1, a CDR2, and a CDR3 having amino acid sequences of the CDR1, the CDR2, and the CDR3 as set forth in SEQ ID NO: 39. CDR sequences can be determined according to well-known numbering systems, e.g., as described in Table 1 above. In some embodiments, the CDRs are according to IMGT numbering. In some embodiments, the CDRs are according to Kabat numbering. In some embodiments, the CDRs are according to AbM numbering. In other embodiments, the CDRs are according to Chothia numbering. In other embodiments, the CDRs are according to Contact numbering. In other embodiments, the CDRs are according to a combination of Kabat numbering and Chothia numbering. In some embodiments, the anti-plgR single domain antibody is camelid. In some embodiments, the anti-plgR single domain antibody is humanized. In some embodiments, the anti-plgR single domain antibody comprises an acceptor human framework, e.g., a human immunoglobulin framework or a human consensus framework.

[0329] In some embodiments, the single domain antibody has a CDR1 having an amino acid sequence of the CDR1 as set forth in SEQ ID NO: 40. In some embodiments, the single domain antibody has a CDR2 having an amino acid sequence of the CDR2 as set forth in SEQ ID NO: 40. In other embodiments, the single domain antibody has a CDR3 having an amino acid sequence of the CDR3 as set forth in SEQ ID NO: 40. In some embodiments, the single domain antibody has a CDR1 and a CDR2 having amino acid sequences of the CDR1 and the CDR2 as set forth in SEQ ID NO: 40. In some embodiments, the single domain antibody has a CDR1 and a CDR3 having amino acid sequences of the CDR1 and the CDR3 as set forth in SEQ ID NO: 40. In some embodiments, the single domain antibody has a CDR2 and a CDR3 having amino acid sequences of the CDR2 and the CDR3 as set forth in SEQ ID NO: 40. In some embodiments, the single domain antibody has a CDR1, a CDR2, and a CDR3 having amino acid sequences of the CDR1, the CDR2, and the CDR3 as set forth in SEQ ID NO: 40. CDR sequences can be determined according to well-known numbering systems, e.g., as described in Table 1 above. In some embodiments, the CDRs are according to IMGT numbering. In some embodiments, the CDRs are according to Kabat numbering. In some embodiments, the CDRs are according to AbM numbering. In other embodiments, the CDRs are according to Chothia numbering. In other embodiments, the CDRs are according to Contact numbering. In other embodiments, the CDRs are according to a combination of Kabat numbering and Chothia numbering. In some embodiments, the anti-plgR single domain antibody is camelid. In some embodiments, the anti-plgR single domain antibody is humanized. In some embodiments, the anti-plgR single domain antibody comprises an acceptor human framework, e.g., a human immunoglobulin framework or a human consensus framework.

[0330] In some embodiments, the single domain antibody has a CDR1 having an amino acid sequence of the CDR1 as set forth in SEQ ID NO: 41. In some embodiments, the single domain antibody has a CDR2 having an amino acid sequence of the CDR2 as set forth in SEQ ID NO: 41. In other embodiments, the single domain antibody has a CDR3 having an amino acid sequence of the CDR3 as set forth in SEQ ID NO: 41. In some embodiments, the single domain antibody has a CDR1 and a CDR2 having amino acid sequences of the CDR1 and the CDR2 as set forth in SEQ ID NO: 41. In some embodiments, the single domain antibody has a CDR1 and a CDR3 having amino acid sequences of the CDR1 and the CDR3 as set forth in SEQ ID NO: 41. In some embodiments, the single domain antibody has a CDR2 and a CDR3 having amino acid sequences of the CDR2 and the CDR3 as set forth in SEQ ID NO: 41. In some embodiments, the single domain antibody has a CDR1, a CDR2, and a CDR3 having amino acid sequences of the CDR1, the CDR2, and the CDR3 as set forth in SEQ ID NO: 41. CDR sequences can be determined according to well-known numbering systems, e.g., as described in Table 1 above. In some embodiments, the CDRs are according to IMGT numbering. In some embodiments, the CDRs are according to Kabat numbering. In some embodiments, the CDRs are according to AbM numbering. In other embodiments, the CDRs are according to Chothia numbering. In other embodiments, the CDRs are according to Contact numbering. In other embodiments, the CDRs are according to a combination of Kabat numbering and Chothia numbering. In some embodiments, the anti-plgR single domain antibody is camelid. In some embodiments, the anti-plgR single domain antibody is humanized. In some embodiments, the anti-plgR single domain antibody comprises an acceptor human framework, e.g., a human immunoglobulin framework or a human consensus framework.

[0331] In some embodiments, the single domain antibody has a CDR1 having an amino acid sequence of the CDR1 as set forth in SEQ ID NO: 42. In some embodiments, the single domain antibody has a CDR2 having an amino acid sequence of the CDR2 as set forth in SEQ ID NO: 42. In other embodiments, the single domain antibody has a CDR3 having an amino acid sequence of the CDR3 as set forth in SEQ ID NO: 42. In some embodiments, the single domain antibody has a CDR1 and a CDR2 having amino acid sequences of the CDR1 and the CDR2 as set forth in SEQ ID NO: 42. In some embodiments, the single domain antibody has a CDR1 and a CDR3 having amino acid sequences of the CDR1 and the CDR3 as set forth in SEQ ID NO: 42. In some embodiments, the single domain antibody has a CDR2 and a CDR3 having amino acid sequences of the CDR2 and the CDR3 as set forth in SEQ ID NO: 42. In some embodiments, the single domain antibody has a CDR1, a CDR2, and a CDR3 having amino acid sequences of the CDR1, the CDR2, and the CDR3 as set forth in SEQ ID NO: 42. CDR sequences can be determined according to well-known numbering systems, e.g., as described in Table 1 above. In some embodiments, the CDRs are according to IMGT numbering. In some embodiments, the CDRs are according to Kabat numbering. In some embodiments, the CDRs are according to AbM numbering. In other embodiments, the CDRs are according to Chothia numbering. In other embodiments, the CDRs are according to Contact numbering. In other embodiments, the CDRs are according to a combination of Kabat numbering and Chothia numbering. In some embodiments, the anti-plgR single domain antibody is camelid. In some embodiments, the anti-plgR single domain antibody is humanized. In some embodiments, the anti-plgR single domain antibody comprises an acceptor human framework, e.g., a human immunoglobulin framework or a human consensus framework.

[0332] In some embodiments, the single domain antibody has a CDR1 having an amino acid sequence of the CDR1 as set forth in SEQ ID NO: 43. In some embodiments, the single domain antibody has a CDR2 having an amino acid sequence of the CDR2 as set forth in SEQ ID NO: 43. In other embodiments, the single domain antibody has a CDR3 having an amino acid sequence of the CDR3 as set forth in SEQ ID NO: 43. In some embodiments, the single domain antibody has a CDR1 and a CDR2 having amino acid sequences of the CDR1 and the CDR2 as set forth in SEQ ID NO: 43. In some embodiments, the single domain antibody has a CDR1 and a CDR3 having amino acid sequences of the CDR1 and the CDR3 as set forth in SEQ ID NO: 43. In some embodiments, the single domain antibody has a CDR2 and a CDR3 having amino acid sequences of the CDR2 and the CDR3 as set forth in SEQ ID NO: 43. In some embodiments, the single domain antibody has a CDR1, a CDR2, and a CDR3 having amino acid sequences of the CDR1, the CDR2, and the CDR3 as set forth in SEQ ID NO: 43. CDR sequences can be determined according to well-known numbering systems, e.g., as described in Table 1 above. In some embodiments, the CDRs are according to IMGT numbering. In some embodiments, the CDRs are according to Kabat numbering. In some embodiments, the CDRs are according to AbM numbering. In other embodiments, the CDRs are according to Chothia numbering. In other embodiments, the CDRs are according to Contact numbering. In other embodiments, the CDRs are according to a combination of Kabat numbering and Chothia numbering. In some embodiments, the anti-plgR single domain antibody is camelid. In some embodiments, the anti-plgR single domain antibody is humanized. In some embodiments, the anti-plgR single domain antibody comprises an acceptor human framework, e.g., a human immunoglobulin framework or a human consensus framework.

[0333] In some embodiments, the single domain antibody has a CDR1 having an amino acid sequence of the CDR1 as set forth in SEQ ID NO: 44. In some embodiments, the single domain antibody has a CDR2 having an amino acid sequence of the CDR2 as set forth in SEQ ID NO: 44. In other embodiments, the single domain antibody has a CDR3 having an amino acid sequence of the CDR3 as set forth in SEQ ID NO: 44. In some embodiments, the single domain antibody has a CDR1 and a CDR2 having amino acid sequences of the CDR1 and the CDR2 as set forth in SEQ ID NO: 44. In some embodiments, the single domain antibody has a CDR1 and a CDR3 having amino acid sequences of the CDR1 and the CDR3 as set forth in SEQ ID NO: 44. In some embodiments, the single domain antibody has a CDR2 and a CDR3 having amino acid sequences of the CDR2 and the CDR3 as set forth in SEQ ID NO: 44. In some embodiments, the single domain antibody has a CDR1, a CDR2, and a CDR3 having amino acid sequences of the CDR1, the CDR2, and the CDR3 as set forth in SEQ ID NO: 44. CDR sequences can be determined according to well-known numbering systems, e.g., as described in Table 1 above. In some embodiments, the CDRs are according to IMGT numbering. In some embodiments, the CDRs are according to Kabat numbering. In some embodiments, the CDRs are according to AbM numbering. In other embodiments, the CDRs are according to Chothia numbering. In other embodiments, the CDRs are according to Contact numbering. In other embodiments, the CDRs are according to a combination of Kabat numbering and Chothia numbering. In some embodiments, the anti-plgR single domain antibody is camelid. In some embodiments, the anti-plgR single domain antibody is humanized. In some embodiments, the anti-plgR single domain antibody comprises an acceptor human framework, e.g., a human immunoglobulin framework or a human consensus framework.

[0334] In some embodiments, the single domain antibody has a CDR1 having an amino acid sequence of the CDR1 as set forth in SEQ ID NO: 45. In some embodiments, the single domain antibody has a CDR2 having an amino acid sequence of the CDR2 as set forth in SEQ ID NO: 45. In other embodiments, the single domain antibody has a CDR3 having an amino acid sequence of the CDR3 as set forth in SEQ ID NO: 45. In some embodiments, the single domain antibody has a CDR1 and a CDR2 having amino acid sequences of the CDR1 and the CDR2 as set forth in SEQ ID NO: 45. In some embodiments, the single domain antibody has a CDR1 and a CDR3 having amino acid sequences of the CDR1 and the CDR3 as set forth in SEQ ID NO: 45. In some embodiments, the single domain antibody has a CDR2 and a CDR3 having amino acid sequences of the CDR2 and the CDR3 as set forth in SEQ ID NO: 45. In some embodiments, the single domain antibody has a CDR1, a CDR2, and a CDR3 having amino acid sequences of the CDR1, the CDR2, and the CDR3 as set forth in SEQ ID NO: 45. CDR sequences can be determined according to well-known numbering systems, e.g., as described in Table 1 above. In some embodiments, the CDRs are according to IMGT numbering. In some embodiments, the CDRs are according to Kabat numbering. In some embodiments, the CDRs are according to AbM numbering. In other embodiments, the CDRs are according to Chothia numbering. In other embodiments, the CDRs are according to Contact numbering. In other embodiments, the CDRs are according to a combination of Kabat numbering and Chothia numbering. In some embodiments, the anti-plgR single domain antibody is camelid. In some embodiments, the anti-plgR single domain antibody is humanized. In some embodiments, the anti-plgR single domain antibody comprises an acceptor human framework, e.g., a human immunoglobulin framework or a human consensus framework.

[0335] In some embodiments, the single domain antibody has a CDR1 having an amino acid sequence of the CDR1 as set forth in SEQ ID NO: 46. In some embodiments, the single domain antibody has a CDR2 having an amino acid sequence of the CDR2 as set forth in SEQ ID NO: 46. In other embodiments, the single domain antibody has a CDR3 having an amino acid sequence of the CDR3 as set forth in SEQ ID NO: 46. In some embodiments, the single domain antibody has a CDR1 and a CDR2 having amino acid sequences of the CDR1 and the CDR2 as set forth in SEQ ID NO: 46. In some embodiments, the single domain antibody has a CDR1 and a CDR3 having amino acid sequences of the CDR1 and the CDR3 as set forth in SEQ ID NO: 46. In some embodiments, the single domain antibody has a CDR2 and a CDR3 having amino acid sequences of the CDR2 and the CDR3 as set forth in SEQ ID NO: 46. In some embodiments, the single domain antibody has a CDR1, a CDR2, and a CDR3 having amino acid sequences of the CDR1, the CDR2, and the CDR3 as set forth in SEQ ID NO: 46. CDR sequences can be determined according to well-known numbering systems, e.g., as described in Table 1 above. In some embodiments, the CDRs are according to IMGT numbering. In some embodiments, the CDRs are according to Kabat numbering. In some embodiments, the CDRs are according to AbM numbering. In other embodiments, the CDRs are according to Chothia numbering. In other embodiments, the CDRs are according to Contact numbering. In other embodiments, the CDRs are according to a combination of Kabat numbering and Chothia numbering. In some embodiments, the anti-plgR single domain antibody is camelid. In some embodiments, the anti-plgR single domain antibody is humanized. In some embodiments, the anti-plgR single domain antibody comprises an acceptor human framework, e.g., a human immunoglobulin framework or a human consensus framework.

[0336] In some embodiments, the single domain antibody has a CDR1 having an amino acid sequence of the CDR1 as set forth in SEQ ID NO: 47. In some embodiments, the single domain antibody has a CDR2 having an amino acid sequence of the CDR2 as set forth in SEQ ID NO: 47. In other embodiments, the single domain antibody has a CDR3 having an amino acid sequence of the CDR3 as set forth in SEQ ID NO: 47. In some embodiments, the single domain antibody has a CDR1 and a CDR2 having amino acid sequences of the CDR1 and the CDR2 as set forth in SEQ ID NO: 47. In some embodiments, the single domain antibody has a CDR1 and a CDR3 having amino acid sequences of the CDR1 and the CDR3 as set forth in SEQ ID NO: 47. In some embodiments, the single domain antibody has a CDR2 and a CDR3 having amino acid sequences of the CDR2 and the CDR3 as set forth in SEQ ID NO: 47. In some embodiments, the single domain antibody has a CDR1, a CDR2, and a CDR3 having amino acid sequences of the CDR1, the CDR2, and the CDR3 as set forth in SEQ ID NO: 47. CDR sequences can be determined according to well-known numbering systems, e.g., as described in Table 1 above. In some embodiments, the CDRs are according to IMGT numbering. In some embodiments, the CDRs are according to Kabat numbering. In some embodiments, the CDRs are according to AbM numbering. In other embodiments, the CDRs are according to Chothia numbering. In other embodiments, the CDRs are according to Contact numbering. In other embodiments, the CDRs are according to a combination of Kabat numbering and Chothia numbering. In some embodiments, the anti-plgR single domain antibody is camelid. In some embodiments, the anti-plgR single domain antibody is humanized. In some embodiments, the anti-plgR single domain antibody comprises an acceptor human framework, e.g., a human immunoglobulin framework or a human consensus framework.

[0337] In some embodiments, the single domain antibody has a CDR1 having an amino acid sequence of the CDR1 as set forth in SEQ ID NO: 48. In some embodiments, the single domain antibody has a CDR2 having an amino acid sequence of the CDR2 as set forth in SEQ ID NO: 48. In other embodiments, the single domain antibody has a CDR3 having an amino acid sequence of the CDR3 as set forth in SEQ ID NO: 48. In some embodiments, the single domain antibody has a CDR1 and a CDR2 having amino acid sequences of the CDR1 and the CDR2 as set forth in SEQ ID NO: 48. In some embodiments, the single domain antibody has a CDR1 and a CDR3 having amino acid sequences of the CDR1 and the CDR3 as set forth in SEQ ID NO: 48. In some embodiments, the single domain antibody has a CDR2 and a CDR3 having amino acid sequences of the CDR2 and the CDR3 as set forth in SEQ ID NO: 48. In some embodiments, the single domain antibody has a CDR1, a CDR2, and a CDR3 having amino acid sequences of the CDR1, the CDR2, and the CDR3 as set forth in SEQ ID NO: 48. CDR sequences can be determined according to well-known numbering systems, e.g., as described in Table 1 above. In some embodiments, the CDRs are according to IMGT numbering. In some embodiments, the CDRs are according to Kabat numbering. In some embodiments, the CDRs are according to AbM numbering. In other embodiments, the CDRs are according to Chothia numbering. In other embodiments, the CDRs are according to Contact numbering. In other embodiments, the CDRs are according to a combination of Kabat numbering and Chothia numbering. In some embodiments, the anti-plgR single domain antibody is camelid. In some embodiments, the anti-plgR single domain antibody is humanized. In some embodiments, the anti-plgR single domain antibody comprises an acceptor human framework, e.g., a human immunoglobulin framework or a human consensus framework.

[0338] In some embodiments, the single domain antibody has a CDR1 having an amino acid sequence of the CDR1 as set forth in SEQ ID NO: 49. In some embodiments, the single domain antibody has a CDR2 having an amino acid sequence of the CDR2 as set forth in SEQ ID NO: 49. In other embodiments, the single domain antibody has a CDR3 having an amino acid sequence of the CDR3 as set forth in SEQ ID NO: 49. In some embodiments, the single domain antibody has a CDR1 and a CDR2 having amino acid sequences of the CDR1 and the CDR2 as set forth in SEQ ID NO: 49. In some embodiments, the single domain antibody has a CDR1 and a CDR3 having amino acid sequences of the CDR1 and the CDR3 as set forth in SEQ ID NO: 49. In some embodiments, the single domain antibody has a CDR2 and a CDR3 having amino acid sequences of the CDR2 and the CDR3 as set forth in SEQ ID NO: 49. In some embodiments, the single domain antibody has a CDR1, a CDR2, and a CDR3 having amino acid sequences of the CDR1, the CDR2, and the CDR3 as set forth in SEQ ID NO: 49. CDR sequences can be determined according to well-known numbering systems, e.g., as described in Table 1 above. In some embodiments, the CDRs are according to IMGT numbering. In some embodiments, the CDRs are according to Kabat numbering. In some embodiments, the CDRs are according to AbM numbering. In other embodiments, the CDRs are according to Chothia numbering. In other embodiments, the CDRs are according to Contact numbering. In other embodiments, the CDRs are according to a combination of Kabat numbering and Chothia numbering. In some embodiments, the anti-plgR single domain antibody is camelid. In some embodiments, the anti-plgR single domain antibody is humanized. In some embodiments, the anti-plgR single domain antibody comprises an acceptor human framework, e.g., a human immunoglobulin framework or a human consensus framework.

[0339] In some embodiments, the single domain antibody has a CDR1 having an amino acid sequence of the CDR1 as set forth in SEQ ID NO: 50. In some embodiments, the single domain antibody has a CDR2 having an amino acid sequence of the CDR2 as set forth in SEQ ID NO: 50. In other embodiments, the single domain antibody has a CDR3 having an amino acid sequence of the CDR3 as set forth in SEQ ID NO: 50. In some embodiments, the single domain antibody has a CDR1 and a CDR2 having amino acid sequences of the CDR1 and the CDR2 as set forth in SEQ ID NO: 50. In some embodiments, the single domain antibody has a CDR1 and a CDR3 having amino acid sequences of the CDR1 and the CDR3 as set forth in SEQ ID NO: 50. In some embodiments, the single domain antibody has a CDR2 and a CDR3 having amino acid sequences of the CDR2 and the CDR3 as set forth in SEQ ID NO: 50. In some embodiments, the single domain antibody has a CDR1, a CDR2, and a CDR3 having amino acid sequences of the CDR1, the CDR2, and the CDR3 as set forth in SEQ ID NO: 50. CDR sequences can be determined according to well-known numbering systems, e.g., as described in Table 1 above. In some embodiments, the CDRs are according to IMGT numbering. In some embodiments, the CDRs are according to Kabat numbering. In some embodiments, the CDRs are according to AbM numbering. In other embodiments, the CDRs are according to Chothia numbering. In other embodiments, the CDRs are according to Contact numbering. In other embodiments, the CDRs are according to a combination of Kabat numbering and Chothia numbering. In some embodiments, the anti-plgR single domain antibody is camelid. In some embodiments, the anti-plgR single domain antibody is humanized. In some embodiments, the anti-plgR single domain antibody comprises an acceptor human framework, e.g., a human immunoglobulin framework or a human consensus framework.

[0340] In some embodiments, the single domain antibody has a CDR1 having an amino acid sequence of the CDR1 as set forth in SEQ ID NO: 51. In some embodiments, the single domain antibody has a CDR2 having an amino acid sequence of the CDR2 as set forth in SEQ ID NO: 51. In other embodiments, the single domain antibody has a CDR3 having an amino acid sequence of the CDR3 as set forth in SEQ ID NO: 51. In some embodiments, the single domain antibody has a CDR1 and a CDR2 having amino acid sequences of the CDR1 and the CDR2 as set forth in SEQ ID NO: 51. In some embodiments, the single domain antibody has a CDR1 and a CDR3 having amino acid sequences of the CDR1 and the CDR3 as set forth in SEQ ID NO: 51. In some embodiments, the single domain antibody has a CDR2 and a CDR3 having amino acid sequences of the CDR2 and the CDR3 as set forth in SEQ ID NO: 51. In some embodiments, the single domain antibody has a CDR1, a CDR2, and a CDR3 having amino acid sequences of the CDR1, the CDR2, and the CDR3 as set forth in SEQ ID NO: 51. CDR sequences can be determined according to well-known numbering systems, e.g., as described in Table 1 above. In some embodiments, the CDRs are according to IMGT numbering. In some embodiments, the CDRs are according to Kabat numbering. In some embodiments, the CDRs are according to AbM numbering. In other embodiments, the CDRs are according to Chothia numbering. In other embodiments, the CDRs are according to Contact numbering. In other embodiments, the CDRs are according to a combination of Kabat numbering and Chothia numbering. In some embodiments, the anti-plgR single domain antibody is camelid. In some embodiments, the anti-plgR single domain antibody is humanized. In some embodiments, the anti-plgR single domain antibody comprises an acceptor human framework, e.g., a human immunoglobulin framework or a human consensus framework.

[0341] In some embodiments, the single domain antibody has a CDR1 having an amino acid sequence of the CDR1 as set forth in SEQ ID NO: 52. In some embodiments, the single domain antibody has a CDR2 having an amino acid sequence of the CDR2 as set forth in SEQ ID NO: 52. In other embodiments, the single domain antibody has a CDR3 having an amino acid sequence of the CDR3 as set forth in SEQ ID NO: 52. In some embodiments, the single domain antibody has a CDR1 and a CDR2 having amino acid sequences of the CDR1 and the CDR2 as set forth in SEQ ID NO: 52. In some embodiments, the single domain antibody has a CDR1 and a CDR3 having amino acid sequences of the CDR1 and the CDR3 as set forth in SEQ ID NO: 52. In some embodiments, the single domain antibody has a CDR2 and a CDR3 having amino acid sequences of the CDR2 and the CDR3 as set forth in SEQ ID NO: 52. In some embodiments, the single domain antibody has a CDR1, a CDR2, and a CDR3 having amino acid sequences of the CDR1, the CDR2, and the CDR3 as set forth in SEQ ID NO: 52. CDR sequences can be determined according to well-known numbering systems, e.g., as described in Table 1 above. In some embodiments, the CDRs are according to IMGT numbering. In some embodiments, the CDRs are according to Kabat numbering. In some embodiments, the CDRs are according to AbM numbering. In other embodiments, the CDRs are according to Chothia numbering. In other embodiments, the CDRs are according to Contact numbering. In other embodiments, the CDRs are according to a combination of Kabat numbering and Chothia numbering. In some embodiments, the anti-plgR single domain antibody is camelid. In some embodiments, the anti-plgR single domain antibody is humanized. In some embodiments, the anti-plgR single domain antibody comprises an acceptor human framework, e.g., a human immunoglobulin framework or a human consensus framework.

[0342] In some embodiments, the single domain antibody has a CDR1 having an amino acid sequence of the CDR1 as set forth in SEQ ID NO: 53. In some embodiments, the single domain antibody has a CDR2 having an amino acid sequence of the CDR2 as set forth in SEQ ID NO: 53. In other embodiments, the single domain antibody has a CDR3 having an amino acid sequence of the CDR3 as set forth in SEQ ID NO: 53. In some embodiments, the single domain antibody has a CDR1 and a CDR2 having amino acid sequences of the CDR1 and the CDR2 as set forth in SEQ ID NO: 53. In some embodiments, the single domain antibody has a CDR1 and a CDR3 having amino acid sequences of the CDR1 and the CDR3 as set forth in SEQ ID NO: 53. In some embodiments, the single domain antibody has a CDR2 and a CDR3 having amino acid sequences of the CDR2 and the CDR3 as set forth in SEQ ID NO: 53. In some embodiments, the single domain antibody has a CDR1, a CDR2, and a CDR3 having amino acid sequences of the CDR1, the CDR2, and the CDR3 as set forth in SEQ ID NO: 53. CDR sequences can be determined according to well-known numbering systems, e.g., as described in Table 1 above. In some embodiments, the CDRs are according to IMGT numbering. In some embodiments, the CDRs are according to Kabat numbering. In some embodiments, the CDRs are according to AbM numbering. In other embodiments, the CDRs are according to Chothia numbering. In other embodiments, the CDRs are according to Contact numbering. In other embodiments, the CDRs are according to a combination of Kabat numbering and Chothia numbering. In some embodiments, the anti-plgR single domain antibody is camelid. In some embodiments, the anti-plgR single domain antibody is humanized. In some embodiments, the anti-plgR single domain antibody comprises an acceptor human framework, e.g., a human immunoglobulin framework or a human consensus framework.

[0343] In some embodiments, the single domain antibody has a CDR1 having an amino acid sequence of the CDR1 as set forth in SEQ ID NO: 54. In some embodiments, the single domain antibody has a CDR2 having an amino acid sequence of the CDR2 as set forth in SEQ ID NO: 54. In other embodiments, the single domain antibody has a CDR3 having an amino acid sequence of the CDR3 as set forth in SEQ ID NO: 54. In some embodiments, the single domain antibody has a CDR1 and a CDR2 having amino acid sequences of the CDR1 and the CDR2 as set forth in SEQ ID NO: 54. In some embodiments, the single domain antibody has a CDR1 and a CDR3 having amino acid sequences of the CDR1 and the CDR3 as set forth in SEQ ID NO: 54. In some embodiments, the single domain antibody has a CDR2 and a CDR3 having amino acid sequences of the CDR2 and the CDR3 as set forth in SEQ ID NO: 54. In some embodiments, the single domain antibody has a CDR1, a CDR2, and a CDR3 having amino acid sequences of the CDR1, the CDR2, and the CDR3 as set forth in SEQ ID NO: 54. CDR sequences can be determined according to well-known numbering systems, e.g., as described in Table 1 above. In some embodiments, the CDRs are according to IMGT numbering. In some embodiments, the CDRs are according to Kabat numbering. In some embodiments, the CDRs are according to AbM numbering. In other embodiments, the CDRs are according to Chothia numbering. In other embodiments, the CDRs are according to Contact numbering. In other embodiments, the CDRs are according to a combination of Kabat numbering and Chothia numbering. In some embodiments, the anti-plgR single domain antibody is camelid. In some embodiments, the anti-plgR single domain antibody is humanized. In some embodiments, the anti-plgR single domain antibody comprises an acceptor human framework, e.g., a human immunoglobulin framework or a human consensus framework.

[0344] In some embodiments, the single domain antibody has a CDR1 having an amino acid sequence of the CDR1 as set forth in SEQ ID NO: 55. In some embodiments, the single domain antibody has a CDR2 having an amino acid sequence of the CDR2 as set forth in SEQ ID NO: 55. In other embodiments, the single domain antibody has a CDR3 having an amino acid sequence of the CDR3 as set forth in SEQ ID NO: 55. In some embodiments, the single domain antibody has a CDR1 and a CDR2 having amino acid sequences of the CDR1 and the CDR2 as set forth in SEQ ID NO: 55. In some embodiments, the single domain antibody has a CDR1 and a CDR3 having amino acid sequences of the CDR1 and the CDR3 as set forth in SEQ ID NO: 55. In some embodiments, the single domain antibody has a CDR2 and a CDR3 having amino acid sequences of the CDR2 and the CDR3 as set forth in SEQ ID NO: 55. In some embodiments, the single domain antibody has a CDR1, a CDR2, and a CDR3 having amino acid sequences of the CDR1, the CDR2, and the CDR3 as set forth in SEQ ID NO: 55. CDR sequences can be determined according to well-known numbering systems, e.g., as described in Table 1 above. In some embodiments, the CDRs are according to IMGT numbering. In some embodiments, the CDRs are according to Kabat numbering. In some embodiments, the CDRs are according to AbM numbering. In other embodiments, the CDRs are according to Chothia numbering. In other embodiments, the CDRs are according to Contact numbering. In other embodiments, the CDRs are according to a combination of Kabat numbering and Chothia numbering. In some embodiments, the anti-plgR single domain antibody is camelid. In some embodiments, the anti-plgR single domain antibody is humanized. In some embodiments, the anti-plgR single domain antibody comprises an acceptor human framework, e.g., a human immunoglobulin framework or a human consensus framework.

[0345] In some embodiments, the single domain antibody has a CDR1 having an amino acid sequence of the CDR1 as set forth in SEQ ID NO: 56. In some embodiments, the single domain antibody has a CDR2 having an amino acid sequence of the CDR2 as set forth in SEQ ID NO: 56. In other embodiments, the single domain antibody has a CDR3 having an amino acid sequence of the CDR3 as set forth in SEQ ID NO: 56. In some embodiments, the single domain antibody has a CDR1 and a CDR2 having amino acid sequences of the CDR1 and the CDR2 as set forth in SEQ ID NO: 56. In some embodiments, the single domain antibody has a CDR1 and a CDR3 having amino acid sequences of the CDR1 and the CDR3 as set forth in SEQ ID NO: 56. In some embodiments, the single domain antibody has a CDR2 and a CDR3 having amino acid sequences of the CDR2 and the CDR3 as set forth in SEQ ID NO: 56. In some embodiments, the single domain antibody has a CDR1, a CDR2, and a CDR3 having amino acid sequences of the CDR1, the CDR2, and the CDR3 as set forth in SEQ ID NO: 56. CDR sequences can be determined according to well-known numbering systems, e.g., as described in Table 1 above. In some embodiments, the CDRs are according to IMGT numbering. In some embodiments, the CDRs are according to Kabat numbering. In some embodiments, the CDRs are according to AbM numbering. In other embodiments, the CDRs are according to Chothia numbering. In other embodiments, the CDRs are according to Contact numbering. In other embodiments, the CDRs are according to a combination of Kabat numbering and Chothia numbering. In some embodiments, the anti-plgR single domain antibody is camelid. In some embodiments, the anti-plgR single domain antibody is humanized. In some embodiments, the anti-plgR single domain antibody comprises an acceptor human framework, e.g., a human immunoglobulin framework or a human consensus framework.

[0346] In some embodiments, the single domain antibody has a CDR1 having an amino acid sequence of the CDR1 as set forth in SEQ ID NO: 57. In some embodiments, the single domain antibody has a CDR2 having an amino acid sequence of the CDR2 as set forth in SEQ ID NO: 57. In other embodiments, the single domain antibody has a CDR3 having an amino acid sequence of the CDR3 as set forth in SEQ ID NO: 57. In some embodiments, the single domain antibody has a CDR1 and a CDR2 having amino acid sequences of the CDR1 and the CDR2 as set forth in SEQ ID NO: 57. In some embodiments, the single domain antibody has a CDR1 and a CDR3 having amino acid sequences of the CDR1 and the CDR3 as set forth in SEQ ID NO: 57. In some embodiments, the single domain antibody has a CDR2 and a CDR3 having amino acid sequences of the CDR2 and the CDR3 as set forth in SEQ ID NO: 57. In some embodiments, the single domain antibody has a CDR1, a CDR2, and a CDR3 having amino acid sequences of the CDR1, the CDR2, and the CDR3 as set forth in SEQ ID NO: 57. CDR sequences can be determined according to well-known numbering systems, e.g., as described in Table 1 above. In some embodiments, the CDRs are according to IMGT numbering. In some embodiments, the CDRs are according to Kabat numbering. In some embodiments, the CDRs are according to AbM numbering. In other embodiments, the CDRs are according to Chothia numbering. In other embodiments, the CDRs are according to Contact numbering. In other embodiments, the CDRs are according to a combination of Kabat numbering and Chothia numbering. In some embodiments, the anti-plgR single domain antibody is camelid. In some embodiments, the anti-plgR single domain antibody is humanized. In some embodiments, the anti-plgR single domain antibody comprises an acceptor human framework, e.g., a human immunoglobulin framework or a human consensus framework.

[0347] In some embodiments, the single domain antibody has a CDR1 having an amino acid sequence of the CDR1 as set forth in SEQ ID NO: 58. In some embodiments, the single domain antibody has a CDR2 having an amino acid sequence of the CDR2 as set forth in SEQ ID NO: 58. In other embodiments, the single domain antibody has a CDR3 having an amino acid sequence of the CDR3 as set forth in SEQ ID NO: 58. In some embodiments, the single domain antibody has a CDR1 and a CDR2 having amino acid sequences of the CDR1 and the CDR2 as set forth in SEQ ID NO: 58. In some embodiments, the single domain antibody has a CDR1 and a CDR3 having amino acid sequences of the CDR1 and the CDR3 as set forth in SEQ ID NO: 58. In some embodiments, the single domain antibody has a CDR2 and a CDR3 having amino acid sequences of the CDR2 and the CDR3 as set forth in SEQ ID NO: 58. In some embodiments, the single domain antibody has a CDR1, a CDR2, and a CDR3 having amino acid sequences of the CDR1, the CDR2, and the CDR3 as set forth in SEQ ID NO: 58. CDR sequences can be determined according to well-known numbering systems, e.g., as described in Table 1 above. In some embodiments, the CDRs are according to IMGT numbering. In some embodiments, the CDRs are according to Kabat numbering. In some embodiments, the CDRs are according to AbM numbering. In other embodiments, the CDRs are according to Chothia numbering. In other embodiments, the CDRs are according to Contact numbering. In other embodiments, the CDRs are according to a combination of Kabat numbering and Chothia numbering. In some embodiments, the anti-plgR single domain antibody is camelid. In some embodiments, the anti-plgR single domain antibody is humanized. In some embodiments, the anti-plgR single domain antibody comprises an acceptor human framework, e.g., a human immunoglobulin framework or a human consensus framework.

[0348] In some embodiments, the single domain antibody has a CDR1 having an amino acid sequence of the CDR1 as set forth in SEQ ID NO: 59. In some embodiments, the single domain antibody has a CDR2 having an amino acid sequence of the CDR2 as set forth in SEQ ID NO: 59. In other embodiments, the single domain antibody has a CDR3 having an amino acid sequence of the CDR3 as set forth in SEQ ID NO: 59. In some embodiments, the single domain antibody has a CDR1 and a CDR2 having amino acid sequences of the CDR1 and the CDR2 as set forth in SEQ ID NO: 59. In some embodiments, the single domain antibody has a CDR1 and a CDR3 having amino acid sequences of the CDR1 and the CDR3 as set forth in SEQ ID NO: 59. In some embodiments, the single domain antibody has a CDR2 and a CDR3 having amino acid sequences of the CDR2 and the CDR3 as set forth in SEQ ID NO: 59. In some embodiments, the single domain antibody has a CDR1, a CDR2, and a CDR3 having amino acid sequences of the CDR1, the CDR2, and the CDR3 as set forth in SEQ ID NO: 59. CDR sequences can be determined according to well-known numbering systems, e.g., as described in Table 1 above. In some embodiments, the CDRs are according to IMGT numbering. In some embodiments, the CDRs are according to Kabat numbering. In some embodiments, the CDRs are according to AbM numbering. In other embodiments, the CDRs are according to Chothia numbering. In other embodiments, the CDRs are according to Contact numbering. In other embodiments, the CDRs are according to a combination of Kabat numbering and Chothia numbering. In some embodiments, the anti-plgR single domain antibody is camelid. In some embodiments, the anti-plgR single domain antibody is humanized. In some embodiments, the anti-plgR single domain antibody comprises an acceptor human framework, e.g., a human immunoglobulin framework or a human consensus framework.

[0349] In some embodiments, the single domain antibody has a CDR1 having an amino acid sequence of the CDR1 as set forth in SEQ ID NO: 60. In some embodiments, the single domain antibody has a CDR2 having an amino acid sequence of the CDR2 as set forth in SEQ ID NO: 60. In other embodiments, the single domain antibody has a CDR3 having an amino acid sequence of the CDR3 as set forth in SEQ ID NO: 60. In some embodiments, the single domain antibody has a CDR1 and a CDR2 having amino acid sequences of the CDR1 and the CDR2 as set forth in SEQ ID NO: 60. In some embodiments, the single domain antibody has a CDR1 and a CDR3 having amino acid sequences of the CDR1 and the CDR3 as set forth in SEQ ID NO: 60. In some embodiments, the single domain antibody has a CDR2 and a CDR3 having amino acid sequences of the CDR2 and the CDR3 as set forth in SEQ ID NO: 60. In some embodiments, the single domain antibody has a CDR1, a CDR2, and a CDR3 having amino acid sequences of the CDR1, the CDR2, and the CDR3 as set forth in SEQ ID NO: 60. CDR sequences can be determined according to well-known numbering systems, e.g., as described in Table 1 above. In some embodiments, the CDRs are according to IMGT numbering. In some embodiments, the CDRs are according to Kabat numbering. In some embodiments, the CDRs are according to AbM numbering. In other embodiments, the CDRs are according to Chothia numbering. In other embodiments, the CDRs are according to Contact numbering. In other embodiments, the CDRs are according to a combination of Kabat numbering and Chothia numbering. In some embodiments, the anti-plgR single domain antibody is camelid. In some embodiments, the anti-plgR single domain antibody is humanized. In some embodiments, the anti-plgR single domain antibody comprises an acceptor human framework, e.g., a human immunoglobulin framework or a human consensus framework.

[0350] In some embodiments, the single domain antibody has a CDR1 having an amino acid sequence of the CDR1 as set forth in SEQ ID NO: 61. In some embodiments, the single domain antibody has a CDR2 having an amino acid sequence of the CDR2 as set forth in SEQ ID NO: 61. In other embodiments, the single domain antibody has a CDR3 having an amino acid sequence of the CDR3 as set forth in SEQ ID NO: 61. In some embodiments, the single domain antibody has a CDR1 and a CDR2 having amino acid sequences of the CDR1 and the CDR2 as set forth in SEQ ID NO: 61. In some embodiments, the single domain antibody has a CDR1 and a CDR3 having amino acid sequences of the CDR1 and the CDR3 as set forth in SEQ ID NO: 61. In some embodiments, the single domain antibody has a CDR2 and a CDR3 having amino acid sequences of the CDR2 and the CDR3 as set forth in SEQ ID NO: 61. In some embodiments, the single domain antibody has a CDR1, a CDR2, and a CDR3 having amino acid sequences of the CDR1, the CDR2, and the CDR3 as set forth in SEQ ID NO: 61. CDR sequences can be determined according to well-known numbering systems, e.g., as described in Table 1 above. In some embodiments, the CDRs are according to IMGT numbering. In some embodiments, the CDRs are according to Kabat numbering. In some embodiments, the CDRs are according to AbM numbering. In other embodiments, the CDRs are according to Chothia numbering. In other embodiments, the CDRs are according to Contact numbering. In other embodiments, the CDRs are according to a combination of Kabat numbering and Chothia numbering. In some embodiments, the anti-plgR single domain antibody is camelid. In some embodiments, the anti-plgR single domain antibody is humanized. In some embodiments, the anti-plgR single domain antibody comprises an acceptor human framework, e.g., a human immunoglobulin framework or a human consensus framework.

[0351] In some embodiments, the single domain antibody has a CDR1 having an amino acid sequence of the CDR1 as set forth in SEQ ID NO: 62. In some embodiments, the single domain antibody has a CDR2 having an amino acid sequence of the CDR2 as set forth in SEQ ID NO: 62. In other embodiments, the single domain antibody has a CDR3 having an amino acid sequence of the CDR3 as set forth in SEQ ID NO: 62. In some embodiments, the single domain antibody has a CDR1 and a CDR2 having amino acid sequences of the CDR1 and the CDR2 as set forth in SEQ ID NO: 62. In some embodiments, the single domain antibody has a CDR1 and a CDR3 having amino acid sequences of the CDR1 and the CDR3 as set forth in SEQ ID NO: 62. In some embodiments, the single domain antibody has a CDR2 and a CDR3 having amino acid sequences of the CDR2 and the CDR3 as set forth in SEQ ID NO: 62. In some embodiments, the single domain antibody has a CDR1, a CDR2, and a CDR3 having amino acid sequences of the CDR1, the CDR2, and the CDR3 as set forth in SEQ ID NO: 62. CDR sequences can be determined according to well-known numbering systems, e.g., as described in Table 1 above. In some embodiments, the CDRs are according to IMGT numbering. In some embodiments, the CDRs are according to Kabat numbering. In some embodiments, the CDRs are according to AbM numbering. In other embodiments, the CDRs are according to Chothia numbering. In other embodiments, the CDRs are according to Contact numbering. In other embodiments, the CDRs are according to a combination of Kabat numbering and Chothia numbering. In some embodiments, the anti-plgR single domain antibody is camelid. In some embodiments, the anti-plgR single domain antibody is humanized. In some embodiments, the anti-plgR single domain antibody comprises an acceptor human framework, e.g., a human immunoglobulin framework or a human consensus framework.

[0352] In some embodiments, the single domain antibody has a CDR1 having an amino acid sequence of the CDR1 as set forth in SEQ ID NO: 63. In some embodiments, the single domain antibody has a CDR2 having an amino acid sequence of the CDR2 as set forth in SEQ ID NO: 63. In other embodiments, the single domain antibody has a CDR3 having an amino acid sequence of the CDR3 as set forth in SEQ ID NO: 63. In some embodiments, the single domain antibody has a CDR1 and a CDR2 having amino acid sequences of the CDR1 and the CDR2 as set forth in SEQ ID NO: 63. In some embodiments, the single domain antibody has a CDR1 and a CDR3 having amino acid sequences of the CDR1 and the CDR3 as set forth in SEQ ID NO: 63. In some embodiments, the single domain antibody has a CDR2 and a CDR3 having amino acid sequences of the CDR2 and the CDR3 as set forth in SEQ ID NO: 63. In some embodiments, the single domain antibody has a CDR1, a CDR2, and a CDR3 having amino acid sequences of the CDR1, the CDR2, and the CDR3 as set forth in SEQ ID NO: 63. CDR sequences can be determined according to well-known numbering systems, e.g., as described in Table 1 above. In some embodiments, the CDRs are according to IMGT numbering. In some embodiments, the CDRs are according to Kabat numbering. In some embodiments, the CDRs are according to AbM numbering. In other embodiments, the CDRs are according to Chothia numbering. In other embodiments, the CDRs are according to Contact numbering. In other embodiments, the CDRs are according to a combination of Kabat numbering and Chothia numbering. In some embodiments, the anti-plgR single domain antibody is camelid. In some embodiments, the anti-plgR single domain antibody is humanized. In some embodiments, the anti-plgR single domain antibody comprises an acceptor human framework, e.g., a human immunoglobulin framework or a human consensus framework.

[0353] In some embodiments, the single domain antibody has a CDR1 having an amino acid sequence of the CDR1 as set forth in SEQ ID NO: 64. In some embodiments, the single domain antibody has a CDR2 having an amino acid sequence of the CDR2 as set forth in SEQ ID NO: 64. In other embodiments, the single domain antibody has a CDR3 having an amino acid sequence of the CDR3 as set forth in SEQ ID NO: 64. In some embodiments, the single domain antibody has a CDR1 and a CDR2 having amino acid sequences of the CDR1 and the CDR2 as set forth in SEQ ID NO: 64. In some embodiments, the single domain antibody has a CDR1 and a CDR3 having amino acid sequences of the CDR1 and the CDR3 as set forth in SEQ ID NO: 64. In some embodiments, the single domain antibody has a CDR2 and a CDR3 having amino acid sequences of the CDR2 and the CDR3 as set forth in SEQ ID NO: 64. In some embodiments, the single domain antibody has a CDR1, a CDR2, and a CDR3 having amino acid sequences of the CDR1, the CDR2, and the CDR3 as set forth in SEQ ID NO: 64. CDR sequences can be determined according to well-known numbering systems, e.g., as described in Table 1 above. In some embodiments, the CDRs are according to IMGT numbering. In some embodiments, the CDRs are according to Kabat numbering. In some embodiments, the CDRs are according to AbM numbering. In other embodiments, the CDRs are according to Chothia numbering. In other embodiments, the CDRs are according to Contact numbering. In other embodiments, the CDRs are according to a combination of Kabat numbering and Chothia numbering. In some embodiments, the anti-plgR single domain antibody is camelid. In some embodiments, the anti-plgR single domain antibody is humanized. In some embodiments, the anti-plgR single domain antibody comprises an acceptor human framework, e.g., a human immunoglobulin framework or a human consensus framework.

[0354] In some embodiments, the single domain antibody has a CDR1 having an amino acid sequence of the CDR1 as set forth in SEQ ID NO: 65. In some embodiments, the single domain antibody has a CDR2 having an amino acid sequence of the CDR2 as set forth in SEQ ID NO: 65. In other embodiments, the single domain antibody has a CDR3 having an amino acid sequence of the CDR3 as set forth in SEQ ID NO: 65. In some embodiments, the single domain antibody has a CDR1 and a CDR2 having amino acid sequences of the CDR1 and the CDR2 as set forth in SEQ ID NO: 65. In some embodiments, the single domain antibody has a CDR1 and a CDR3 having amino acid sequences of the CDR1 and the CDR3 as set forth in SEQ ID NO: 65. In some embodiments, the single domain antibody has a CDR2 and a CDR3 having amino acid sequences of the CDR2 and the CDR3 as set forth in SEQ ID NO: 65. In some embodiments, the single domain antibody has a CDR1, a CDR2, and a CDR3 having amino acid sequences of the CDR1, the CDR2, and the CDR3 as set forth in SEQ ID NO: 65. CDR sequences can be determined according to well-known numbering systems, e.g., as described in Table 1 above. In some embodiments, the CDRs are according to IMGT numbering. In some embodiments, the CDRs are according to Kabat numbering. In some embodiments, the CDRs are according to AbM numbering. In other embodiments, the CDRs are according to Chothia numbering. In other embodiments, the CDRs are according to Contact numbering. In other embodiments, the CDRs are according to a combination of Kabat numbering and Chothia numbering. In some embodiments, the anti-plgR single domain antibody is camelid. In some embodiments, the anti-plgR single domain antibody is humanized. In some embodiments, the anti-plgR single domain antibody comprises an acceptor human framework, e.g., a human immunoglobulin framework or a human consensus framework.

[0355] In some embodiments, the single domain antibody has a CDR1 having an amino acid sequence of the CDR1 as set forth in SEQ ID NO: 66. In some embodiments, the single domain antibody has a CDR2 having an amino acid sequence of the CDR2 as set forth in SEQ ID NO: 66. In other embodiments, the single domain antibody has a CDR3 having an amino acid sequence of the CDR3 as set forth in SEQ ID NO: 66. In some embodiments, the single domain antibody has a CDR1 and a CDR2 having amino acid sequences of the CDR1 and the CDR2 as set forth in SEQ ID NO: 66. In some embodiments, the single domain antibody has a CDR1 and a CDR3 having amino acid sequences of the CDR1 and the CDR3 as set forth in SEQ ID NO: 66. In some embodiments, the single domain antibody has a CDR2 and a CDR3 having amino acid sequences of the CDR2 and the CDR3 as set forth in SEQ ID NO: 66. In some embodiments, the single domain antibody has a CDR1, a CDR2, and a CDR3 having amino acid sequences of the CDR1, the CDR2, and the CDR3 as set forth in SEQ ID NO: 66. CDR sequences can be determined according to well-known numbering systems, e.g., as described in Table 1 above. In some embodiments, the CDRs are according to IMGT numbering. In some embodiments, the CDRs are according to Kabat numbering. In some embodiments, the CDRs are according to AbM numbering. In other embodiments, the CDRs are according to Chothia numbering. In other embodiments, the CDRs are according to Contact numbering. In other embodiments, the CDRs are according to a combination of Kabat numbering and Chothia numbering. In some embodiments, the anti-plgR single domain antibody is camelid. In some embodiments, the anti-plgR single domain antibody is humanized. In some embodiments, the anti-plgR single domain antibody comprises an acceptor human framework, e.g., a human immunoglobulin framework or a human consensus framework.

[0356] In some embodiments, the single domain antibody has a CDR1 having an amino acid sequence of the CDR1 as set forth in SEQ ID NO: 67. In some embodiments, the single domain antibody has a CDR2 having an amino acid sequence of the CDR2 as set forth in SEQ ID NO: 67. In other embodiments, the single domain antibody has a CDR3 having an amino acid sequence of the CDR3 as set forth in SEQ ID NO: 67. In some embodiments, the single domain antibody has a CDR1 and a CDR2 having amino acid sequences of the CDR1 and the CDR2 as set forth in SEQ ID NO: 67. In some embodiments, the single domain antibody has a CDR1 and a CDR3 having amino acid sequences of the CDR1 and the CDR3 as set forth in SEQ ID NO: 67. In some embodiments, the single domain antibody has a CDR2 and a CDR3 having amino acid sequences of the CDR2 and the CDR3 as set forth in SEQ ID NO: 67. In some embodiments, the single domain antibody has a CDR1, a CDR2, and a CDR3 having amino acid sequences of the CDR1, the CDR2, and the CDR3 as set forth in SEQ ID NO: 67. CDR sequences can be determined according to well-known numbering systems, e.g., as described in Table 1 above. In some embodiments, the CDRs are according to IMGT numbering. In some embodiments, the CDRs are according to Kabat numbering. In some embodiments, the CDRs are according to AbM numbering. In other embodiments, the CDRs are according to Chothia numbering. In other embodiments, the CDRs are according to Contact numbering. In other embodiments, the CDRs are according to a combination of Kabat numbering and Chothia numbering. In some embodiments, the anti-plgR single domain antibody is camelid. In some embodiments, the anti-plgR single domain antibody is humanized. In some embodiments, the anti-plgR single domain antibody comprises an acceptor human framework, e.g., a human immunoglobulin framework or a human consensus framework.

[0357] In some embodiments, the single domain antibody has a CDR1 having an amino acid sequence of the CDR1 as set forth in SEQ ID NO: 68. In some embodiments, the single domain antibody has a CDR2 having an amino acid sequence of the CDR2 as set forth in SEQ ID NO: 68. In other embodiments, the single domain antibody has a CDR3 having an amino acid sequence of the CDR3 as set forth in SEQ ID NO: 68. In some embodiments, the single domain antibody has a CDR1 and a CDR2 having amino acid sequences of the CDR1 and the CDR2 as set forth in SEQ ID NO: 68. In some embodiments, the single domain antibody has a CDR1 and a CDR3 having amino acid sequences of the CDR1 and the CDR3 as set forth in SEQ ID NO: 68. In some embodiments, the single domain antibody has a CDR2 and a CDR3 having amino acid sequences of the CDR2 and the CDR3 as set forth in SEQ ID NO: 68. In some embodiments, the single domain antibody has a CDR1, a CDR2, and a CDR3 having amino acid sequences of the CDR1, the CDR2, and the CDR3 as set forth in SEQ ID NO: 68. CDR sequences can be determined according to well-known numbering systems, e.g., as described in Table 1 above. In some embodiments, the CDRs are according to IMGT numbering. In some embodiments, the CDRs are according to Kabat numbering. In some embodiments, the CDRs are according to AbM numbering. In other embodiments, the CDRs are according to Chothia numbering. In other embodiments, the CDRs are according to Contact numbering. In other embodiments, the CDRs are according to a combination of Kabat numbering and Chothia numbering. In some embodiments, the anti-plgR single domain antibody is camelid. In some embodiments, the anti-plgR single domain antibody is humanized. In some embodiments, the anti-plgR single domain antibody comprises an acceptor human framework, e.g., a human immunoglobulin framework or a human consensus framework.

[0358] In some embodiments, the single domain antibody has a CDR1 having an amino acid sequence of the CDR1 as set forth in SEQ ID NO: 69. In some embodiments, the single domain antibody has a CDR2 having an amino acid sequence of the CDR2 as set forth in SEQ ID NO: 69. In other embodiments, the single domain antibody has a CDR3 having an amino acid sequence of the CDR3 as set forth in SEQ ID NO: 69. In some embodiments, the single domain antibody has a CDR1 and a CDR2 having amino acid sequences of the CDR1 and the CDR2 as set forth in SEQ ID NO: 69. In some embodiments, the single domain antibody has a CDR1 and a CDR3 having amino acid sequences of the CDR1 and the CDR3 as set forth in SEQ ID NO: 69. In some embodiments, the single domain antibody has a CDR2 and a CDR3 having amino acid sequences of the CDR2 and the CDR3 as set forth in SEQ ID NO: 69. In some embodiments, the single domain antibody has a CDR1, a CDR2, and a CDR3 having amino acid sequences of the CDR1, the CDR2, and the CDR3 as set forth in SEQ ID NO: 69. CDR sequences can be determined according to well-known numbering systems, e.g., as described in Table 1 above. In some embodiments, the CDRs are according to IMGT numbering. In some embodiments, the CDRs are according to Kabat numbering. In some embodiments, the CDRs are according to AbM numbering. In other embodiments, the CDRs are according to Chothia numbering. In other embodiments, the CDRs are according to Contact numbering. In other embodiments, the CDRs are according to a combination of Kabat numbering and Chothia numbering. In some embodiments, the anti-plgR single domain antibody is camelid. In some embodiments, the anti-plgR single domain antibody is humanized. In some embodiments, the anti-plgR single domain antibody comprises an acceptor human framework, e.g., a human immunoglobulin framework or a human consensus framework.

[0359] In some embodiments, the single domain antibody has a CDR1 having an amino acid sequence of the CDR1 as set forth in SEQ ID NO: 70. In some embodiments, the single domain antibody has a CDR2 having an amino acid sequence of the CDR2 as set forth in SEQ ID NO: 70. In other embodiments, the single domain antibody has a CDR3 having an amino acid sequence of the CDR3 as set forth in SEQ ID NO: 70. In some embodiments, the single domain antibody has a CDR1 and a CDR2 having amino acid sequences of the CDR1 and the CDR2 as set forth in SEQ ID NO: 70. In some embodiments, the single domain antibody has a CDR1 and a CDR3 having amino acid sequences of the CDR1 and the CDR3 as set forth in SEQ ID NO: 70. In some embodiments, the single domain antibody has a CDR2 and a CDR3 having amino acid sequences of the CDR2 and the CDR3 as set forth in SEQ ID NO: 70. In some embodiments, the single domain antibody has a CDR1, a CDR2, and a CDR3 having amino acid sequences of the CDR1, the CDR2, and the CDR3 as set forth in SEQ ID NO: 70. CDR sequences can be determined according to well-known numbering systems, e.g., as described in Table 1 above. In some embodiments, the CDRs are according to IMGT numbering. In some embodiments, the CDRs are according to Kabat numbering. In some embodiments, the CDRs are according to AbM numbering. In other embodiments, the CDRs are according to Chothia numbering. In other embodiments, the CDRs are according to Contact numbering. In other embodiments, the CDRs are according to a combination of Kabat numbering and Chothia numbering. In some embodiments, the anti-plgR single domain antibody is camelid. In some embodiments, the anti-plgR single domain antibody is humanized. In some embodiments, the anti-plgR single domain antibody comprises an acceptor human framework, e.g., a human immunoglobulin framework or a human consensus framework.

[0360] In some embodiments, the single domain antibody has a CDR1 having an amino acid sequence of the CDR1 as set forth in SEQ ID NO: 71. In some embodiments, the single domain antibody has a CDR2 having an amino acid sequence of the CDR2 as set forth in SEQ ID NO: 71. In other embodiments, the single domain antibody has a CDR3 having an amino acid sequence of the CDR3 as set forth in SEQ ID NO: 71. In some embodiments, the single domain antibody has a CDR1 and a CDR2 having amino acid sequences of the CDR1 and the CDR2 as set forth in SEQ ID NO: 71. In some embodiments, the single domain antibody has a CDR1 and a CDR3 having amino acid sequences of the CDR1 and the CDR3 as set forth in SEQ ID NO: 71. In some embodiments, the single domain antibody has a CDR2 and a CDR3 having amino acid sequences of the CDR2 and the CDR3 as set forth in SEQ ID NO: 71. In some embodiments, the single domain antibody has a CDR1, a CDR2, and a CDR3 having amino acid sequences of the CDR1, the CDR2, and the CDR3 as set forth in SEQ ID NO: 71. CDR sequences can be determined according to well-known numbering systems, e.g., as described in Table 1 above. In some embodiments, the CDRs are according to IMGT numbering. In some embodiments, the CDRs are according to Kabat numbering. In some embodiments, the CDRs are according to AbM numbering. In other embodiments, the CDRs are according to Chothia numbering. In other embodiments, the CDRs are according to Contact numbering. In other embodiments, the CDRs are according to a combination of Kabat numbering and Chothia numbering. In some embodiments, the anti-plgR single domain antibody is camelid. In some embodiments, the anti-plgR single domain antibody is humanized. In some embodiments, the anti-plgR single domain antibody comprises an acceptor human framework, e.g., a human immunoglobulin framework or a human consensus framework.

[0361] In some embodiments, the single domain antibody has a CDR1 having an amino acid sequence of the CDR1 as set forth in SEQ ID NO: 72. In some embodiments, the single domain antibody has a CDR2 having an amino acid sequence of the CDR2 as set forth in SEQ ID NO: 72. In other embodiments, the single domain antibody has a CDR3 having an amino acid sequence of the CDR3 as set forth in SEQ ID NO: 72. In some embodiments, the single domain antibody has a CDR1 and a CDR2 having amino acid sequences of the CDR1 and the CDR2 as set forth in SEQ ID NO: 72. In some embodiments, the single domain antibody has a CDR1 and a CDR3 having amino acid sequences of the CDR1 and the CDR3 as set forth in SEQ ID NO: 72. In some embodiments, the single domain antibody has a CDR2 and a CDR3 having amino acid sequences of the CDR2 and the CDR3 as set forth in SEQ ID NO: 72. In some embodiments, the single domain antibody has a CDR1, a CDR2, and a CDR3 having amino acid sequences of the CDR1, the CDR2, and the CDR3 as set forth in SEQ ID NO: 72. CDR sequences can be determined according to well-known numbering systems, e.g., as described in Table 1 above. In some embodiments, the CDRs are according to IMGT numbering. In some embodiments, the CDRs are according to Kabat numbering. In some embodiments, the CDRs are according to AbM numbering. In other embodiments, the CDRs are according to Chothia numbering. In other embodiments, the CDRs are according to Contact numbering. In other embodiments, the CDRs are according to a combination of Kabat numbering and Chothia numbering. In some embodiments, the anti-plgR single domain antibody is camelid. In some embodiments, the anti-plgR single domain antibody is humanized. In some embodiments, the anti-plgR single domain antibody comprises an acceptor human framework, e.g., a human immunoglobulin framework or a human consensus framework.

[0362] In some embodiments, the single domain antibody has a CDR1 having an amino acid sequence of the CDR1 as set forth in SEQ ID NO: 73. In some embodiments, the single domain antibody has a CDR2 having an amino acid sequence of the CDR2 as set forth in SEQ ID NO: 73. In other embodiments, the single domain antibody has a CDR3 having an amino acid sequence of the CDR3 as set forth in SEQ ID NO: 73. In some embodiments, the single domain antibody has a CDR1 and a CDR2 having amino acid sequences of the CDR1 and the CDR2 as set forth in SEQ ID NO: 73. In some embodiments, the single domain antibody has a CDR1 and a CDR3 having amino acid sequences of the CDR1 and the CDR3 as set forth in SEQ ID NO: 73. In some embodiments, the single domain antibody has a CDR2 and a CDR3 having amino acid sequences of the CDR2 and the CDR3 as set forth in SEQ ID NO: 73. In some embodiments, the single domain antibody has a CDR1, a CDR2, and a CDR3 having amino acid sequences of the CDR1, the CDR2, and the CDR3 as set forth in SEQ ID NO: 73. CDR sequences can be determined according to well-known numbering systems, e.g., as described in Table 1 above. In some embodiments, the CDRs are according to IMGT numbering. In some embodiments, the CDRs are according to Kabat numbering. In some embodiments, the CDRs are according to AbM numbering. In other embodiments, the CDRs are according to Chothia numbering. In other embodiments, the CDRs are according to Contact numbering. In other embodiments, the CDRs are according to a combination of Kabat numbering and Chothia numbering. In some embodiments, the anti-plgR single domain antibody is camelid. In some embodiments, the anti-plgR single domain antibody is humanized. In some embodiments, the anti-plgR single domain antibody comprises an acceptor human framework, e.g., a human immunoglobulin framework or a human consensus framework.

[0363] In some embodiments, the single domain antibody has a CDR1 having an amino acid sequence of the CDR1 as set forth in SEQ ID NO: 74. In some embodiments, the single domain antibody has a CDR2 having an amino acid sequence of the CDR2 as set forth in SEQ ID NO: 74. In other embodiments, the single domain antibody has a CDR3 having an amino acid sequence of the CDR3 as set forth in SEQ ID NO: 74. In some embodiments, the single domain antibody has a CDR1 and a CDR2 having amino acid sequences of the CDR1 and the CDR2 as set forth in SEQ ID NO: 74. In some embodiments, the single domain antibody has a CDR1 and a CDR3 having amino acid sequences of the CDR1 and the CDR3 as set forth in SEQ ID NO: 74. In some embodiments, the single domain antibody has a CDR2 and a CDR3 having amino acid sequences of the CDR2 and the CDR3 as set forth in SEQ ID NO: 74. In some embodiments, the single domain antibody has a CDR1, a CDR2, and a CDR3 having amino acid sequences of the CDR1, the CDR2, and the CDR3 as set forth in SEQ ID NO: 74. CDR sequences can be determined according to well-known numbering systems, e.g., as described in Table 1 above. In some embodiments, the CDRs are according to IMGT numbering. In some embodiments, the CDRs are according to Kabat numbering. In some embodiments, the CDRs are according to AbM numbering. In other embodiments, the CDRs are according to Chothia numbering. In other embodiments, the CDRs are according to Contact numbering. In other embodiments, the CDRs are according to a combination of Kabat numbering and Chothia numbering. In some embodiments, the anti-plgR single domain antibody is camelid. In some embodiments, the anti-plgR single domain antibody is humanized. In some embodiments, the anti-plgR single domain antibody comprises an acceptor human framework, e.g., a human immunoglobulin framework or a human consensus framework.

[0364] In some embodiments, the single domain antibody has a CDR1 having an amino acid sequence of the CDR1 as set forth in SEQ ID NO: 75. In some embodiments, the single domain antibody has a CDR2 having an amino acid sequence of the CDR2 as set forth in SEQ ID NO: 75. In other embodiments, the single domain antibody has a CDR3 having an amino acid sequence of the CDR3 as set forth in SEQ ID NO: 75. In some embodiments, the single domain antibody has a CDR1 and a CDR2 having amino acid sequences of the CDR1 and the CDR2 as set forth in SEQ ID NO: 75. In some embodiments, the single domain antibody has a CDR1 and a CDR3 having amino acid sequences of the CDR1 and the CDR3 as set forth in SEQ ID NO: 75. In some embodiments, the single domain antibody has a CDR2 and a CDR3 having amino acid sequences of the CDR2 and the CDR3 as set forth in SEQ ID NO: 75. In some embodiments, the single domain antibody has a CDR1, a CDR2, and a CDR3 having amino acid sequences of the CDR1, the CDR2, and the CDR3 as set forth in SEQ ID NO: 75. CDR sequences can be determined according to well-known numbering systems, e.g., as described in Table 1 above. In some embodiments, the CDRs are according to IMGT numbering. In some embodiments, the CDRs are according to Kabat numbering. In some embodiments, the CDRs are according to AbM numbering. In other embodiments, the CDRs are according to Chothia numbering. In other embodiments, the CDRs are according to Contact numbering. In other embodiments, the CDRs are according to a combination of Kabat numbering and Chothia numbering. In some embodiments, the anti-plgR single domain antibody is camelid. In some embodiments, the anti-plgR single domain antibody is humanized. In some embodiments, the anti-plgR single domain antibody comprises an acceptor human framework, e.g., a human immunoglobulin framework or a human consensus framework.

[0365] In some embodiments, the single domain antibody has a CDR1 having an amino acid sequence of the CDR1 as set forth in SEQ ID NO: 76. In some embodiments, the single domain antibody has a CDR2 having an amino acid sequence of the CDR2 as set forth in SEQ ID NO: 76. In other embodiments, the single domain antibody has a CDR3 having an amino acid sequence of the CDR3 as set forth in SEQ ID NO: 76. In some embodiments, the single domain antibody has a CDR1 and a CDR2 having amino acid sequences of the CDR1 and the CDR2 as set forth in SEQ ID NO: 76. In some embodiments, the single domain antibody has a CDR1 and a CDR3 having amino acid sequences of the CDR1 and the CDR3 as set forth in SEQ ID NO: 76. In some embodiments, the single domain antibody has a CDR2 and a CDR3 having amino acid sequences of the CDR2 and the CDR3 as set forth in SEQ ID NO: 76. In some embodiments, the single domain antibody has a CDR1, a CDR2, and a CDR3 having amino acid sequences of the CDR1, the CDR2, and the CDR3 as set forth in SEQ ID NO: 76. CDR sequences can be determined according to well-known numbering systems, e.g., as described in Table 1 above. In some embodiments, the CDRs are according to IMGT numbering. In some embodiments, the CDRs are according to Kabat numbering. In some embodiments, the CDRs are according to AbM numbering. In other embodiments, the CDRs are according to Chothia numbering. In other embodiments, the CDRs are according to Contact numbering. In other embodiments, the CDRs are according to a combination of Kabat numbering and Chothia numbering. In some embodiments, the anti-plgR single domain antibody is camelid. In some embodiments, the anti-plgR single domain antibody is humanized. In some embodiments, the anti-plgR single domain antibody comprises an acceptor human framework, e.g., a human immunoglobulin framework or a human consensus framework.

[0366] In some embodiments, the single domain antibody has a CDR1 having an amino acid sequence of the CDR1 as set forth in SEQ ID NO: 77. In some embodiments, the single domain antibody has a CDR2 having an amino acid sequence of the CDR2 as set forth in SEQ ID NO: 77. In other embodiments, the single domain antibody has a CDR3 having an amino acid sequence of the CDR3 as set forth in SEQ ID NO: 77. In some embodiments, the single domain antibody has a CDR1 and a CDR2 having amino acid sequences of the CDR1 and the CDR2 as set forth in SEQ ID NO: 77. In some embodiments, the single domain antibody has a CDR1 and a CDR3 having amino acid sequences of the CDR1 and the CDR3 as set forth in SEQ ID NO: 77. In some embodiments, the single domain antibody has a CDR2 and a CDR3 having amino acid sequences of the CDR2 and the CDR3 as set forth in SEQ ID NO: 77. In some embodiments, the single domain antibody has a CDR1, a CDR2, and a CDR3 having amino acid sequences of the CDR1, the CDR2, and the CDR3 as set forth in SEQ ID NO: 77. CDR sequences can be determined according to well-known numbering systems, e.g., as described in Table 1 above. In some embodiments, the CDRs are according to IMGT numbering. In some embodiments, the CDRs are according to Kabat numbering. In some embodiments, the CDRs are according to AbM numbering. In other embodiments, the CDRs are according to Chothia numbering. In other embodiments, the CDRs are according to Contact numbering. In other embodiments, the CDRs are according to a combination of Kabat numbering and Chothia numbering. In some embodiments, the anti-plgR single domain antibody is camelid. In some embodiments, the anti-plgR single domain antibody is humanized. In some embodiments, the anti-plgR single domain antibody comprises an acceptor human framework, e.g., a human immunoglobulin framework or a human consensus framework.

[0367] In some embodiments, the single domain antibody has a CDR1 having an amino acid sequence of the CDR1 as set forth in SEQ ID NO: 78. In some embodiments, the single domain antibody has a CDR2 having an amino acid sequence of the CDR2 as set forth in SEQ ID NO: 78. In other embodiments, the single domain antibody has a CDR3 having an amino acid sequence of the CDR3 as set forth in SEQ ID NO: 78. In some embodiments, the single domain antibody has a CDR1 and a CDR2 having amino acid sequences of the CDR1 and the CDR2 as set forth in SEQ ID NO: 78. In some embodiments, the single domain antibody has a CDR1 and a CDR3 having amino acid sequences of the CDR1 and the CDR3 as set forth in SEQ ID NO: 78. In some embodiments, the single domain antibody has a CDR2 and a CDR3 having amino acid sequences of the CDR2 and the CDR3 as set forth in SEQ ID NO: 78. In some embodiments, the single domain antibody has a CDR1, a CDR2, and a CDR3 having amino acid sequences of the CDR1, the CDR2, and the CDR3 as set forth in SEQ ID NO: 78. CDR sequences can be determined according to well-known numbering systems, e.g., as described in Table 1 above. In some embodiments, the CDRs are according to IMGT numbering. In some embodiments, the CDRs are according to Kabat numbering. In some embodiments, the CDRs are according to AbM numbering. In other embodiments, the CDRs are according to Chothia numbering. In other embodiments, the CDRs are according to Contact numbering. In other embodiments, the CDRs are according to a combination of Kabat numbering and Chothia numbering. In some embodiments, the anti-plgR single domain antibody is camelid. In some embodiments, the anti-plgR single domain antibody is humanized. In some embodiments, the anti-plgR single domain antibody comprises an acceptor human framework, e.g., a human immunoglobulin framework or a human consensus framework.

[0368] In some embodiments, the single domain antibody has a CDR1 having an amino acid sequence of the CDR1 as set forth in SEQ ID NO: 79. In some embodiments, the single domain antibody has a CDR2 having an amino acid sequence of the CDR2 as set forth in SEQ ID NO: 79. In other embodiments, the single domain antibody has a CDR3 having an amino acid sequence of the CDR3 as set forth in SEQ ID NO: 79. In some embodiments, the single domain antibody has a CDR1 and a CDR2 having amino acid sequences of the CDR1 and the CDR2 as set forth in SEQ ID NO: 79. In some embodiments, the single domain antibody has a CDR1 and a CDR3 having amino acid sequences of the CDR1 and the CDR3 as set forth in SEQ ID NO: 79. In some embodiments, the single domain antibody has a CDR2 and a CDR3 having amino acid sequences of the CDR2 and the CDR3 as set forth in SEQ ID NO: 79. In some embodiments, the single domain antibody has a CDR1, a CDR2, and a CDR3 having amino acid sequences of the CDR1, the CDR2, and the CDR3 as set forth in SEQ ID NO: 79. CDR sequences can be determined according to well-known numbering systems, e.g., as described in Table 1 above. In some embodiments, the CDRs are according to IMGT numbering. In some embodiments, the CDRs are according to Kabat numbering. In some embodiments, the CDRs are according to AbM numbering. In other embodiments, the CDRs are according to Chothia numbering. In other embodiments, the CDRs are according to Contact numbering. In other embodiments, the CDRs are according to a combination of Kabat numbering and Chothia numbering. In some embodiments, the anti-plgR single domain antibody is camelid. In some embodiments, the anti-plgR single domain antibody is humanized. In some embodiments, the anti-plgR single domain antibody comprises an acceptor human framework, e.g., a human immunoglobulin framework or a human consensus framework.

[0369] In some embodiments, the single domain antibody has a CDR1 having an amino acid sequence of the CDR1 as set forth in SEQ ID NO: 80. In some embodiments, the single domain antibody has a CDR2 having an amino acid sequence of the CDR2 as set forth in SEQ ID NO: 80. In other embodiments, the single domain antibody has a CDR3 having an amino acid sequence of the CDR3 as set forth in SEQ ID NO: 80. In some embodiments, the single domain antibody has a CDR1 and a CDR2 having amino acid sequences of the CDR1 and the CDR2 as set forth in SEQ ID NO: 80. In some embodiments, the single domain antibody has a CDR1 and a CDR3 having amino acid sequences of the CDR1 and the CDR3 as set forth in SEQ ID NO: 80. In some embodiments, the single domain antibody has a CDR2 and a CDR3 having amino acid sequences of the CDR2 and the CDR3 as set forth in SEQ ID NO: 80. In some embodiments, the single domain antibody has a CDR1, a CDR2, and a CDR3 having amino acid sequences of the CDR1, the CDR2, and the CDR3 as set forth in SEQ ID NO: 80. CDR sequences can be determined according to well-known numbering systems, e.g., as described in Table 1 above. In some embodiments, the CDRs are according to IMGT numbering. In some embodiments, the CDRs are according to Kabat numbering. In some embodiments, the CDRs are according to AbM numbering. In other embodiments, the CDRs are according to Chothia numbering. In other embodiments, the CDRs are according to Contact numbering. In other embodiments, the CDRs are according to a combination of Kabat numbering and Chothia numbering. In some embodiments, the anti-plgR single domain antibody is camelid. In some embodiments, the anti-plgR single domain antibody is humanized. In some embodiments, the anti-plgR single domain antibody comprises an acceptor human framework, e.g., a human immunoglobulin framework or a human consensus framework.

[0370] In some embodiments, the single domain antibody has a CDR1 having an amino acid sequence of the CDR1 as set forth in SEQ ID NO: 81. In some embodiments, the single domain antibody has a CDR2 having an amino acid sequence of the CDR2 as set forth in SEQ ID NO: 81. In other embodiments, the single domain antibody has a CDR3 having an amino acid sequence of the CDR3 as set forth in SEQ ID NO: 81. In some embodiments, the single domain antibody has a CDR1 and a CDR2 having amino acid sequences of the CDR1 and the CDR2 as set forth in SEQ ID NO: 81. In some embodiments, the single domain antibody has a CDR1 and a CDR3 having amino acid sequences of the CDR1 and the CDR3 as set forth in SEQ ID NO: 81. In some embodiments, the single domain antibody has a CDR2 and a CDR3 having amino acid sequences of the CDR2 and the CDR3 as set forth in SEQ ID NO: 81. In some embodiments, the single domain antibody has a CDR1, a CDR2, and a CDR3 having amino acid sequences of the CDR1, the CDR2, and the CDR3 as set forth in SEQ ID NO: 81. CDR sequences can be determined according to well-known numbering systems, e.g., as described in Table 1 above. In some embodiments, the CDRs are according to IMGT numbering. In some embodiments, the CDRs are according to Kabat numbering. In some embodiments, the CDRs are according to AbM numbering. In other embodiments, the CDRs are according to Chothia numbering. In other embodiments, the CDRs are according to Contact numbering. In other embodiments, the CDRs are according to a combination of Kabat numbering and Chothia numbering. In some embodiments, the anti-plgR single domain antibody is camelid. In some embodiments, the anti-plgR single domain antibody is humanized. In some embodiments, the anti-plgR single domain antibody comprises an acceptor human framework, e.g., a human immunoglobulin framework or a human consensus framework.

[0371] In some embodiments, the single domain antibody has a CDR1 having an amino acid sequence of the CDR1 as set forth in SEQ ID NO: 82. In some embodiments, the single domain antibody has a CDR2 having an amino acid sequence of the CDR2 as set forth in SEQ ID NO: 82. In other embodiments, the single domain antibody has a CDR3 having an amino acid sequence of the CDR3 as set forth in SEQ ID NO: 82. In some embodiments, the single domain antibody has a CDR1 and a CDR2 having amino acid sequences of the CDR1 and the CDR2 as set forth in SEQ ID NO: 82. In some embodiments, the single domain antibody has a CDR1 and a CDR3 having amino acid sequences of the CDR1 and the CDR3 as set forth in SEQ ID NO: 82. In some embodiments, the single domain antibody has a CDR2 and a CDR3 having amino acid sequences of the CDR2 and the CDR3 as set forth in SEQ ID NO: 82. In some embodiments, the single domain antibody has a CDR1, a CDR2, and a CDR3 having amino acid sequences of the CDR1, the CDR2, and the CDR3 as set forth in SEQ ID NO: 82. CDR sequences can be determined according to well-known numbering systems, e.g., as described in Table 1 above. In some embodiments, the CDRs are according to IMGT numbering. In some embodiments, the CDRs are according to Kabat numbering. In some embodiments, the CDRs are according to AbM numbering. In other embodiments, the CDRs are according to Chothia numbering. In other embodiments, the CDRs are according to Contact numbering. In other embodiments, the CDRs are according to a combination of Kabat numbering and Chothia numbering. In some embodiments, the anti-plgR single domain antibody is camelid. In some embodiments, the anti-plgR single domain antibody is humanized. In some embodiments, the anti-plgR single domain antibody comprises an acceptor human framework, e.g., a human immunoglobulin framework or a human consensus framework.

[0372] In some embodiments, the single domain antibody has a CDR1 having an amino acid sequence of the CDR1 as set forth in SEQ ID NO: 83. In some embodiments, the single domain antibody has a CDR2 having an amino acid sequence of the CDR2 as set forth in SEQ ID NO: 83. In other embodiments, the single domain antibody has a CDR3 having an amino acid sequence of the CDR3 as set forth in SEQ ID NO: 83. In some embodiments, the single domain antibody has a CDR1 and a CDR2 having amino acid sequences of the CDR1 and the CDR2 as set forth in SEQ ID NO: 83. In some embodiments, the single domain antibody has a CDR1 and a CDR3 having amino acid sequences of the CDR1 and the CDR3 as set forth in SEQ ID NO: 83. In some embodiments, the single domain antibody has a CDR2 and a CDR3 having amino acid sequences of the CDR2 and the CDR3 as set forth in SEQ ID NO: 83. In some embodiments, the single domain antibody has a CDR1, a CDR2, and a CDR3 having amino acid sequences of the CDR1, the CDR2, and the CDR3 as set forth in SEQ ID NO: 83. CDR sequences can be determined according to well-known numbering systems, e.g., as described in Table 1 above. In some embodiments, the CDRs are according to IMGT numbering. In some embodiments, the CDRs are according to Kabat numbering. In some embodiments, the CDRs are according to AbM numbering. In other embodiments, the CDRs are according to Chothia numbering. In other embodiments, the CDRs are according to Contact numbering. In other embodiments, the CDRs are according to a combination of Kabat numbering and Chothia numbering. In some embodiments, the anti-plgR single domain antibody is camelid. In some embodiments, the anti-plgR single domain antibody is humanized. In some embodiments, the anti-plgR single domain antibody comprises an acceptor human framework, e.g., a human immunoglobulin framework or a human consensus framework.

[0373] In some embodiments, the single domain antibody has a CDR1 having an amino acid sequence of the CDR1 as set forth in SEQ ID NO: 84. In some embodiments, the single domain antibody has a CDR2 having an amino acid sequence of the CDR2 as set forth in SEQ ID NO: 84. In other embodiments, the single domain antibody has a CDR3 having an amino acid sequence of the CDR3 as set forth in SEQ ID NO: 84. In some embodiments, the single domain antibody has a CDR1 and a CDR2 having amino acid sequences of the CDR1 and the CDR2 as set forth in SEQ ID NO: 84. In some embodiments, the single domain antibody has a CDR1 and a CDR3 having amino acid sequences of the CDR1 and the CDR3 as set forth in SEQ ID NO: 84. In some embodiments, the single domain antibody has a CDR2 and a CDR3 having amino acid sequences of the CDR2 and the CDR3 as set forth in SEQ ID NO: 84. In some embodiments, the single domain antibody has a CDR1, a CDR2, and a CDR3 having amino acid sequences of the CDR1, the CDR2, and the CDR3 as set forth in SEQ ID NO: 84. CDR sequences can be determined according to well-known numbering systems, e.g., as described in Table 1 above. In some embodiments, the CDRs are according to IMGT numbering. In some embodiments, the CDRs are according to Kabat numbering. In some embodiments, the CDRs are according to AbM numbering. In other embodiments, the CDRs are according to Chothia numbering. In other embodiments, the CDRs are according to Contact numbering. In other embodiments, the CDRs are according to a combination of Kabat numbering and Chothia numbering. In some embodiments, the anti-plgR single domain antibody is camelid. In some embodiments, the anti-plgR single domain antibody is humanized. In some embodiments, the anti-plgR single domain antibody comprises an acceptor human framework, e.g., a human immunoglobulin framework or a human consensus framework.

[0374] In some embodiments, the single domain antibody has a CDR1 having an amino acid sequence of the CDR1 as set forth in SEQ ID NO: 85. In some embodiments, the single domain antibody has a CDR2 having an amino acid sequence of the CDR2 as set forth in SEQ ID NO: 85. In other embodiments, the single domain antibody has a CDR3 having an amino acid sequence of the CDR3 as set forth in SEQ ID NO: 85. In some embodiments, the single domain antibody has a CDR1 and a CDR2 having amino acid sequences of the CDR1 and the CDR2 as set forth in SEQ ID NO: 85. In some embodiments, the single domain antibody has a CDR1 and a CDR3 having amino acid sequences of the CDR1 and the CDR3 as set forth in SEQ ID NO: 85. In some embodiments, the single domain antibody has a CDR2 and a CDR3 having amino acid sequences of the CDR2 and the CDR3 as set forth in SEQ ID NO: 85. In some embodiments, the single domain antibody has a CDR1, a CDR2, and a CDR3 having amino acid sequences of the CDR1, the CDR2, and the CDR3 as set forth in SEQ ID NO: 85. CDR sequences can be determined according to well-known numbering systems, e.g., as described in Table 1 above. In some embodiments, the CDRs are according to IMGT numbering. In some embodiments, the CDRs are according to Kabat numbering. In some embodiments, the CDRs are according to AbM numbering. In other embodiments, the CDRs are according to Chothia numbering. In other embodiments, the CDRs are according to Contact numbering. In other embodiments, the CDRs are according to a combination of Kabat numbering and Chothia numbering. In some embodiments, the anti-plgR single domain antibody is camelid. In some embodiments, the anti-plgR single domain antibody is humanized. In some embodiments, the anti-plgR single domain antibody comprises an acceptor human framework, e.g., a human immunoglobulin framework or a human consensus framework.

[0375] In some embodiments, the single domain antibody has a CDR1 having an amino acid sequence of the CDR1 as set forth in SEQ ID NO: 86. In some embodiments, the single domain antibody has a CDR2 having an amino acid sequence of the CDR2 as set forth in SEQ ID NO: 86. In other embodiments, the single domain antibody has a CDR3 having an amino acid sequence of the CDR3 as set forth in SEQ ID NO: 86. In some embodiments, the single domain antibody has a CDR1 and a CDR2 having amino acid sequences of the CDR1 and the CDR2 as set forth in SEQ ID NO: 86. In some embodiments, the single domain antibody has a CDR1 and a CDR3 having amino acid sequences of the CDR1 and the CDR3 as set forth in SEQ ID NO: 86. In some embodiments, the single domain antibody has a CDR2 and a CDR3 having amino acid sequences of the CDR2 and the CDR3 as set forth in SEQ ID NO: 86. In some embodiments, the single domain antibody has a CDR1, a CDR2, and a CDR3 having amino acid sequences of the CDR1, the CDR2, and the CDR3 as set forth in SEQ ID NO: 86. CDR sequences can be determined according to well-known numbering systems, e.g., as described in Table 1 above. In some embodiments, the CDRs are according to IMGT numbering. In some embodiments, the CDRs are according to Kabat numbering. In some embodiments, the CDRs are according to AbM numbering. In other embodiments, the CDRs are according to Chothia numbering. In other embodiments, the CDRs are according to Contact numbering. In other embodiments, the CDRs are according to a combination of Kabat numbering and Chothia numbering. In some embodiments, the anti-plgR single domain antibody is camelid. In some embodiments, the anti-plgR single domain antibody is humanized. In some embodiments, the anti-plgR single domain antibody comprises an acceptor human framework, e.g., a human immunoglobulin framework or a human consensus framework.

[0376] In some embodiments, the single domain antibody has a CDR1 having an amino acid sequence of the CDR1 as set forth in SEQ ID NO: 87. In some embodiments, the single domain antibody has a CDR2 having an amino acid sequence of the CDR2 as set forth in SEQ ID NO: 87. In other embodiments, the single domain antibody has a CDR3 having an amino acid sequence of the CDR3 as set forth in SEQ ID NO: 87. In some embodiments, the single domain antibody has a CDR1 and a CDR2 having amino acid sequences of the CDR1 and the CDR2 as set forth in SEQ ID NO: 87. In some embodiments, the single domain antibody has a CDR1 and a CDR3 having amino acid sequences of the CDR1 and the CDR3 as set forth in SEQ ID NO: 87. In some embodiments, the single domain antibody has a CDR2 and a CDR3 having amino acid sequences of the CDR2 and the CDR3 as set forth in SEQ ID NO: 87. In some embodiments, the single domain antibody has a CDR1, a CDR2, and a CDR3 having amino acid sequences of the CDR1, the CDR2, and the CDR3 as set forth in SEQ ID NO: 87. CDR sequences can be determined according to well-known numbering systems, e.g., as described in Table 1 above. In some embodiments, the CDRs are according to IMGT numbering. In some embodiments, the CDRs are according to Kabat numbering. In some embodiments, the CDRs are according to AbM numbering. In other embodiments, the CDRs are according to Chothia numbering. In other embodiments, the CDRs are according to Contact numbering. In other embodiments, the CDRs are according to a combination of Kabat numbering and Chothia numbering. In some embodiments, the anti-plgR single domain antibody is camelid. In some embodiments, the anti-plgR single domain antibody is humanized. In some embodiments, the anti-plgR single domain antibody comprises an acceptor human framework, e.g., a human immunoglobulin framework or a human consensus framework.

[0377] In some embodiments, the single domain antibody has a CDR1 having an amino acid sequence of the CDR1 as set forth in SEQ ID NO: 88. In some embodiments, the single domain antibody has a CDR2 having an amino acid sequence of the CDR2 as set forth in SEQ ID NO: 88. In other embodiments, the single domain antibody has a CDR3 having an amino acid sequence of the CDR3 as set forth in SEQ ID NO: 88. In some embodiments, the single domain antibody has a CDR1 and a CDR2 having amino acid sequences of the CDR1 and the CDR2 as set forth in SEQ ID NO: 88. In some embodiments, the single domain antibody has a CDR1 and a CDR3 having amino acid sequences of the CDR1 and the CDR3 as set forth in SEQ ID NO: 88. In some embodiments, the single domain antibody has a CDR2 and a CDR3 having amino acid sequences of the CDR2 and the CDR3 as set forth in SEQ ID NO: 88. In some embodiments, the single domain antibody has a CDR1, a CDR2, and a CDR3 having amino acid sequences of the CDR1, the CDR2, and the CDR3 as set forth in SEQ ID NO: 88. CDR sequences can be determined according to well-known numbering systems, e.g., as described in Table 1 above. In some embodiments, the CDRs are according to IMGT numbering. In some embodiments, the CDRs are according to Kabat numbering. In some embodiments, the CDRs are according to AbM numbering. In other embodiments, the CDRs are according to Chothia numbering. In other embodiments, the CDRs are according to Contact numbering. In other embodiments, the CDRs are according to a combination of Kabat numbering and Chothia numbering. In some embodiments, the anti-plgR single domain antibody is camelid. In some embodiments, the anti-plgR single domain antibody is humanized. In some embodiments, the anti-plgR single domain antibody comprises an acceptor human framework, e.g., a human immunoglobulin framework or a human consensus framework.

[0378] In some embodiments, the single domain antibody has a CDR1 having an amino acid sequence of the CDR1 as set forth in SEQ ID NO: 89. In some embodiments, the single domain antibody has a CDR2 having an amino acid sequence of the CDR2 as set forth in SEQ ID NO: 89. In other embodiments, the single domain antibody has a CDR3 having an amino acid sequence of the CDR3 as set forth in SEQ ID NO: 89. In some embodiments, the single domain antibody has a CDR1 and a CDR2 having amino acid sequences of the CDR1 and the CDR2 as set forth in SEQ ID NO: 89. In some embodiments, the single domain antibody has a CDR1 and a CDR3 having amino acid sequences of the CDR1 and the CDR3 as set forth in SEQ ID NO: 89. In some embodiments, the single domain antibody has a CDR2 and a CDR3 having amino acid sequences of the CDR2 and the CDR3 as set forth in SEQ ID NO: 89. In some embodiments, the single domain antibody has a CDR1, a CDR2, and a CDR3 having amino acid sequences of the CDR1, the CDR2, and the CDR3 as set forth in SEQ ID NO: 89. CDR sequences can be determined according to well-known numbering systems, e.g., as described in Table 1 above. In some embodiments, the CDRs are according to IMGT numbering. In some embodiments, the CDRs are according to Kabat numbering. In some embodiments, the CDRs are according to AbM numbering. In other embodiments, the CDRs are according to Chothia numbering. In other embodiments, the CDRs are according to Contact numbering. In other embodiments, the CDRs are according to a combination of Kabat numbering and Chothia numbering. In some embodiments, the anti-plgR single domain antibody is camelid. In some embodiments, the anti-plgR single domain antibody is humanized. In some embodiments, the anti-plgR single domain antibody comprises an acceptor human framework, e.g., a human immunoglobulin framework or a human consensus framework.

[0379] In some embodiments, the single domain antibody has a CDR1 having an amino acid sequence of the CDR1 as set forth in SEQ ID NO: 90. In some embodiments, the single domain antibody has a CDR2 having an amino acid sequence of the CDR2 as set forth in SEQ ID NO: 90. In other embodiments, the single domain antibody has a CDR3 having an amino acid sequence of the CDR3 as set forth in SEQ ID NO: 90. In some embodiments, the single domain antibody has a CDR1 and a CDR2 having amino acid sequences of the CDR1 and the CDR2 as set forth in SEQ ID NO: 90. In some embodiments, the single domain antibody has a CDR1 and a CDR3 having amino acid sequences of the CDR1 and the CDR3 as set forth in SEQ ID NO: 90. In some embodiments, the single domain antibody has a CDR2 and a CDR3 having amino acid sequences of the CDR2 and the CDR3 as set forth in SEQ ID NO: 90. In some embodiments, the single domain antibody has a CDR1, a CDR2, and a CDR3 having amino acid sequences of the CDR1, the CDR2, and the CDR3 as set forth in SEQ ID NO: 90. CDR sequences can be determined according to well-known numbering systems, e.g., as described in Table 1 above. In some embodiments, the CDRs are according to IMGT numbering. In some embodiments, the CDRs are according to Kabat numbering. In some embodiments, the CDRs are according to AbM numbering. In other embodiments, the CDRs are according to Chothia numbering. In other embodiments, the CDRs are according to Contact numbering. In other embodiments, the CDRs are according to a combination of Kabat numbering and Chothia numbering. In some embodiments, the anti-plgR single domain antibody is camelid. In some embodiments, the anti-plgR single domain antibody is humanized. In some embodiments, the anti-plgR single domain antibody comprises an acceptor human framework, e.g., a human immunoglobulin framework or a human consensus framework.

[0380] In some embodiments, the single domain antibody has a CDR1 having an amino acid sequence of the CDR1 as set forth in SEQ ID NO: 91. In some embodiments, the single domain antibody has a CDR2 having an amino acid sequence of the CDR2 as set forth in SEQ ID NO: 91. In other embodiments, the single domain antibody has a CDR3 having an amino acid sequence of the CDR3 as set forth in SEQ ID NO: 91. In some embodiments, the single domain antibody has a CDR1 and a CDR2 having amino acid sequences of the CDR1 and the CDR2 as set forth in SEQ ID NO: 91. In some embodiments, the single domain antibody has a CDR1 and a CDR3 having amino acid sequences of the CDR1 and the CDR3 as set forth in SEQ ID NO: 91. In some embodiments, the single domain antibody has a CDR2 and a CDR3 having amino acid sequences of the CDR2 and the CDR3 as set forth in SEQ ID NO: 91. In some embodiments, the single domain antibody has a CDR1, a CDR2, and a CDR3 having amino acid sequences of the CDR1, the CDR2, and the CDR3 as set forth in SEQ ID NO: 91. CDR sequences can be determined according to well-known numbering systems, e.g., as described in Table 1 above. In some embodiments, the CDRs are according to IMGT numbering. In some embodiments, the CDRs are according to Kabat numbering. In some embodiments, the CDRs are according to AbM numbering. In other embodiments, the CDRs are according to Chothia numbering. In other embodiments, the CDRs are according to Contact numbering. In other embodiments, the CDRs are according to a combination of Kabat numbering and Chothia numbering. In some embodiments, the anti-plgR single domain antibody is camelid. In some embodiments, the anti-plgR single domain antibody is humanized. In some embodiments, the anti-plgR single domain antibody comprises an acceptor human framework, e.g., a human immunoglobulin framework or a human consensus framework.

[0381] In some embodiments, the single domain antibody has a CDR1 having an amino acid sequence of the CDR1 as set forth in SEQ ID NO: 92. In some embodiments, the single domain antibody has a CDR2 having an amino acid sequence of the CDR2 as set forth in SEQ ID NO: 92. In other embodiments, the single domain antibody has a CDR3 having an amino acid sequence of the CDR3 as set forth in SEQ ID NO: 92. In some embodiments, the single domain antibody has a CDR1 and a CDR2 having amino acid sequences of the CDR1 and the CDR2 as set forth in SEQ ID NO: 92. In some embodiments, the single domain antibody has a CDR1 and a CDR3 having amino acid sequences of the CDR1 and the CDR3 as set forth in SEQ ID NO: 92. In some embodiments, the single domain antibody has a CDR2 and a CDR3 having amino acid sequences of the CDR2 and the CDR3 as set forth in SEQ ID NO: 92. In some embodiments, the single domain antibody has a CDR1, a CDR2, and a CDR3 having amino acid sequences of the CDR1, the CDR2, and the CDR3 as set forth in SEQ ID NO: 92. CDR sequences can be determined according to well-known numbering systems, e.g., as described in Table 1 above. In some embodiments, the CDRs are according to IMGT numbering. In some embodiments, the CDRs are according to Kabat numbering. In some embodiments, the CDRs are according to AbM numbering. In other embodiments, the CDRs are according to Chothia numbering. In other embodiments, the CDRs are according to Contact numbering. In other embodiments, the CDRs are according to a combination of Kabat numbering and Chothia numbering. In some embodiments, the anti-plgR single domain antibody is camelid. In some embodiments, the anti-plgR single domain antibody is humanized. In some embodiments, the anti-plgR single domain antibody comprises an acceptor human framework, e.g., a human immunoglobulin framework or a human consensus framework.

[0382] In some embodiments, the single domain antibody has a CDR1 having an amino acid sequence of the CDR1 as set forth in SEQ ID NO: 93. In some embodiments, the single domain antibody has a CDR2 having an amino acid sequence of the CDR2 as set forth in SEQ ID NO: 93. In other embodiments, the single domain antibody has a CDR3 having an amino acid sequence of the CDR3 as set forth in SEQ ID NO: 93. In some embodiments, the single domain antibody has a CDR1 and a CDR2 having amino acid sequences of the CDR1 and the CDR2 as set forth in SEQ ID NO: 93. In some embodiments, the single domain antibody has a CDR1 and a CDR3 having amino acid sequences of the CDR1 and the CDR3 as set forth in SEQ ID NO: 93. In some embodiments, the single domain antibody has a CDR2 and a CDR3 having amino acid sequences of the CDR2 and the CDR3 as set forth in SEQ ID NO: 93. In some embodiments, the single domain antibody has a CDR1, a CDR2, and a CDR3 having amino acid sequences of the CDR1, the CDR2, and the CDR3 as set forth in SEQ ID NO: 93. CDR sequences can be determined according to well-known numbering systems, e.g., as described in Table 1 above. In some embodiments, the CDRs are according to IMGT numbering. In some embodiments, the CDRs are according to Kabat numbering. In some embodiments, the CDRs are according to AbM numbering. In other embodiments, the CDRs are according to Chothia numbering. In other embodiments, the CDRs are according to Contact numbering. In other embodiments, the CDRs are according to a combination of Kabat numbering and Chothia numbering. In some embodiments, the anti-plgR single domain antibody is camelid. In some embodiments, the anti-plgR single domain antibody is humanized. In some embodiments, the anti-plgR single domain antibody comprises an acceptor human framework, e.g., a human immunoglobulin framework or a human consensus framework.

[0383] In some embodiments, the single domain antibody has a CDR1 having an amino acid sequence of the CDR1 as set forth in SEQ ID NO: 94. In some embodiments, the single domain antibody has a CDR2 having an amino acid sequence of the CDR2 as set forth in SEQ ID NO: 94. In other embodiments, the single domain antibody has a CDR3 having an amino acid sequence of the CDR3 as set forth in SEQ ID NO: 94. In some embodiments, the single domain antibody has a CDR1 and a CDR2 having amino acid sequences of the CDR1 and the CDR2 as set forth in SEQ ID NO: 94. In some embodiments, the single domain antibody has a CDR1 and a CDR3 having amino acid sequences of the CDR1 and the CDR3 as set forth in SEQ ID NO: 94. In some embodiments, the single domain antibody has a CDR2 and a CDR3 having amino acid sequences of the CDR2 and the CDR3 as set forth in SEQ ID NO: 94. In some embodiments, the single domain antibody has a CDR1, a CDR2, and a CDR3 having amino acid sequences of the CDR1, the CDR2, and the CDR3 as set forth in SEQ ID NO: 94. CDR sequences can be determined according to well-known numbering systems, e.g., as described in Table 1 above. In some embodiments, the CDRs are according to IMGT numbering. In some embodiments, the CDRs are according to Kabat numbering. In some embodiments, the CDRs are according to AbM numbering. In other embodiments, the CDRs are according to Chothia numbering. In other embodiments, the CDRs are according to Contact numbering. In other embodiments, the CDRs are according to a combination of Kabat numbering and Chothia numbering. In some embodiments, the anti-plgR single domain antibody is camelid. In some embodiments, the anti-plgR single domain antibody is humanized. In some embodiments, the anti-plgR single domain antibody comprises an acceptor human framework, e.g., a human immunoglobulin framework or a human consensus framework.

[0384] In some embodiments, the single domain antibody has a CDR1 having an amino acid sequence of the CDR1 as set forth in SEQ ID NO: 95. In some embodiments, the single domain antibody has a CDR2 having an amino acid sequence of the CDR2 as set forth in SEQ ID NO: 95. In other embodiments, the single domain antibody has a CDR3 having an amino acid sequence of the CDR3 as set forth in SEQ ID NO: 95. In some embodiments, the single domain antibody has a CDR1 and a CDR2 having amino acid sequences of the CDR1 and the CDR2 as set forth in SEQ ID NO: 95. In some embodiments, the single domain antibody has a CDR1 and a CDR3 having amino acid sequences of the CDR1 and the CDR3 as set forth in SEQ ID NO: 95. In some embodiments, the single domain antibody has a CDR2 and a CDR3 having amino acid sequences of the CDR2 and the CDR3 as set forth in SEQ ID NO: 95. In some embodiments, the single domain antibody has a CDR1, a CDR2, and a CDR3 having amino acid sequences of the CDR1, the CDR2, and the CDR3 as set forth in SEQ ID NO: 95. CDR sequences can be determined according to well-known numbering systems, e.g., as described in Table 1 above. In some embodiments, the CDRs are according to IMGT numbering. In some embodiments, the CDRs are according to Kabat numbering. In some embodiments, the CDRs are according to AbM numbering. In other embodiments, the CDRs are according to Chothia numbering. In other embodiments, the CDRs are according to Contact numbering. In other embodiments, the CDRs are according to a combination of Kabat numbering and Chothia numbering. In some embodiments, the anti-plgR single domain antibody is camelid. In some embodiments, the anti-plgR single domain antibody is humanized. In some embodiments, the anti-plgR single domain antibody comprises an acceptor human framework, e.g., a human immunoglobulin framework or a human consensus framework.

[0385] In some embodiments, the single domain antibody has a CDR1 having an amino acid sequence of the CDR1 as set forth in SEQ ID NO: 96. In some embodiments, the single domain antibody has a CDR2 having an amino acid sequence of the CDR2 as set forth in SEQ ID NO: 96. In other embodiments, the single domain antibody has a CDR3 having an amino acid sequence of the CDR3 as set forth in SEQ ID NO: 96. In some embodiments, the single domain antibody has a CDR1 and a CDR2 having amino acid sequences of the CDR1 and the CDR2 as set forth in SEQ ID NO: 96. In some embodiments, the single domain antibody has a CDR1 and a CDR3 having amino acid sequences of the CDR1 and the CDR3 as set forth in SEQ ID NO: 96. In some embodiments, the single domain antibody has a CDR2 and a CDR3 having amino acid sequences of the CDR2 and the CDR3 as set forth in SEQ ID NO: 96. In some embodiments, the single domain antibody has a CDR1, a CDR2, and a CDR3 having amino acid sequences of the CDR1, the CDR2, and the CDR3 as set forth in SEQ ID NO: 96. CDR sequences can be determined according to well-known numbering systems, e.g., as described in Table 1 above. In some embodiments, the CDRs are according to IMGT numbering. In some embodiments, the CDRs are according to Kabat numbering. In some embodiments, the CDRs are according to AbM numbering. In other embodiments, the CDRs are according to Chothia numbering. In other embodiments, the CDRs are according to Contact numbering. In other embodiments, the CDRs are according to a combination of Kabat numbering and Chothia numbering. In some embodiments, the anti-plgR single domain antibody is camelid. In some embodiments, the anti-plgR single domain antibody is humanized. In some embodiments, the anti-plgR single domain antibody comprises an acceptor human framework, e.g., a human immunoglobulin framework or a human consensus framework.

[0386] In some embodiments, the single domain antibody has a CDR1 having an amino acid sequence of the CDR1 as set forth in SEQ ID NO: 97. In some embodiments, the single domain antibody has a CDR2 having an amino acid sequence of the CDR2 as set forth in SEQ ID NO: 97. In other embodiments, the single domain antibody has a CDR3 having an amino acid sequence of the CDR3 as set forth in SEQ ID NO: 97. In some embodiments, the single domain antibody has a CDR1 and a CDR2 having amino acid sequences of the CDR1 and the CDR2 as set forth in SEQ ID NO: 97. In some embodiments, the single domain antibody has a CDR1 and a CDR3 having amino acid sequences of the CDR1 and the CDR3 as set forth in SEQ ID NO: 97. In some embodiments, the single domain antibody has a CDR2 and a CDR3 having amino acid sequences of the CDR2 and the CDR3 as set forth in SEQ ID NO: 97. In some embodiments, the single domain antibody has a CDR1, a CDR2, and a CDR3 having amino acid sequences of the CDR1, the CDR2, and the CDR3 as set forth in SEQ ID NO: 97. CDR sequences can be determined according to well-known numbering systems, e.g., as described in Table 1 above. In some embodiments, the CDRs are according to IMGT numbering. In some embodiments, the CDRs are according to Kabat numbering. In some embodiments, the CDRs are according to AbM numbering. In other embodiments, the CDRs are according to Chothia numbering. In other embodiments, the CDRs are according to Contact numbering. In other embodiments, the CDRs are according to a combination of Kabat numbering and Chothia numbering. In some embodiments, the anti-plgR single domain antibody is camelid. In some embodiments, the anti-plgR single domain antibody is humanized. In some embodiments, the anti-plgR single domain antibody comprises an acceptor human framework, e.g., a human immunoglobulin framework or a human consensus framework.

[0387] In some embodiments, the single domain antibody has a CDR1 having an amino acid sequence of the CDR1 as set forth in SEQ ID NO: 98. In some embodiments, the single domain antibody has a CDR2 having an amino acid sequence of the CDR2 as set forth in SEQ ID NO: 98. In other embodiments, the single domain antibody has a CDR3 having an amino acid sequence of the CDR3 as set forth in SEQ ID NO: 98. In some embodiments, the single domain antibody has a CDR1 and a CDR2 having amino acid sequences of the CDR1 and the CDR2 as set forth in SEQ ID NO: 98. In some embodiments, the single domain antibody has a CDR1 and a CDR3 having amino acid sequences of the CDR1 and the CDR3 as set forth in SEQ ID NO: 98. In some embodiments, the single domain antibody has a CDR2 and a CDR3 having amino acid sequences of the CDR2 and the CDR3 as set forth in SEQ ID NO: 98. In some embodiments, the single domain antibody has a CDR1, a CDR2, and a CDR3 having amino acid sequences of the CDR1, the CDR2, and the CDR3 as set forth in SEQ ID NO: 98. CDR sequences can be determined according to well-known numbering systems, e.g., as described in Table 1 above. In some embodiments, the CDRs are according to IMGT numbering. In some embodiments, the CDRs are according to Kabat numbering. In some embodiments, the CDRs are according to AbM numbering. In other embodiments, the CDRs are according to Chothia numbering. In other embodiments, the CDRs are according to Contact numbering. In other embodiments, the CDRs are according to a combination of Kabat numbering and Chothia numbering. In some embodiments, the anti-plgR single domain antibody is camelid. In some embodiments, the anti-plgR single domain antibody is humanized. In some embodiments, the anti-plgR single domain antibody comprises an acceptor human framework, e.g., a human immunoglobulin framework or a human consensus framework.

[0388] In some embodiments, the single domain antibody has a CDR1 having an amino acid sequence of the CDR1 as set forth in SEQ ID NO: 99. In some embodiments, the single domain antibody has a CDR2 having an amino acid sequence of the CDR2 as set forth in SEQ ID NO: 99. In other embodiments, the single domain antibody has a CDR3 having an amino acid sequence of the CDR3 as set forth in SEQ ID NO: 99. In some embodiments, the single domain antibody has a CDR1 and a CDR2 having amino acid sequences of the CDR1 and the CDR2 as set forth in SEQ ID NO: 99. In some embodiments, the single domain antibody has a CDR1 and a CDR3 having amino acid sequences of the CDR1 and the CDR3 as set forth in SEQ ID NO: 99. In some embodiments, the single domain antibody has a CDR2 and a CDR3 having amino acid sequences of the CDR2 and the CDR3 as set forth in SEQ ID NO: 99. In some embodiments, the single domain antibody has a CDR1, a CDR2, and a CDR3 having amino acid sequences of the CDR1, the CDR2, and the CDR3 as set forth in SEQ ID NO: 99. CDR sequences can be determined according to well-known numbering systems, e.g., as described in Table 1 above. In some embodiments, the CDRs are according to IMGT numbering. In some embodiments, the CDRs are according to Kabat numbering. In some embodiments, the CDRs are according to AbM numbering. In other embodiments, the CDRs are according to Chothia numbering. In other embodiments, the CDRs are according to Contact numbering. In other embodiments, the CDRs are according to a combination of Kabat numbering and Chothia numbering. In some embodiments, the anti-plgR single domain antibody is camelid. In some embodiments, the anti-plgR single domain antibody is humanized. In some embodiments, the anti-plgR single domain antibody comprises an acceptor human framework, e.g., a human immunoglobulin framework or a human consensus framework.

[0389] In some embodiments, the single domain antibody has a CDR1 having an amino acid sequence of the CDR1 as set forth in SEQ ID NO: 100. In some embodiments, the single domain antibody has a CDR2 having an amino acid sequence of the CDR2 as set forth in SEQ ID NO: 100. In other embodiments, the single domain antibody has a CDR3 having an amino acid sequence of the CDR3 as set forth in SEQ ID NO: 100. In some embodiments, the single domain antibody has a CDR1 and a CDR2 having amino acid sequences of the CDR1 and the CDR2 as set forth in SEQ ID NO: 100. In some embodiments, the single domain antibody has a CDR1 and a CDR3 having amino acid sequences of the CDR1 and the CDR3 as set forth in SEQ ID NO: 100. In some embodiments, the single domain antibody has a CDR2 and a CDR3 having amino acid sequences of the CDR2 and the CDR3 as set forth in SEQ ID NO: 100. In some embodiments, the single domain antibody has a CDR1, a CDR2, and a CDR3 having amino acid sequences of the CDR1, the CDR2, and the CDR3 as set forth in SEQ ID NO: 100. CDR sequences can be determined according to well-known numbering systems, e.g., as described in Table 1 above. In some embodiments, the CDRs are according to IMGT numbering. In some embodiments, the CDRs are according to Kabat numbering. In some embodiments, the CDRs are according to AbM numbering. In other embodiments, the CDRs are according to Chothia numbering. In other embodiments, the CDRs are according to Contact numbering. In other embodiments, the CDRs are according to a combination of Kabat numbering and Chothia numbering. In some embodiments, the anti-plgR single domain antibody is camelid. In some embodiments, the anti-plgR single domain antibody is humanized. In some embodiments, the anti-plgR single domain antibody comprises an acceptor human framework, e.g., a human immunoglobulin framework or a human consensus framework.

[0390] In some embodiments, the single domain antibody has a CDR1 having an amino acid sequence of the CDR1 as set forth in SEQ ID NO: 101. In some embodiments, the single domain antibody has a CDR2 having an amino acid sequence of the CDR2 as set forth in SEQ ID NO: 101. In other embodiments, the single domain antibody has a CDR3 having an amino acid sequence of the CDR3 as set forth in SEQ ID NO: 101. In some embodiments, the single domain antibody has a CDR1 and a CDR2 having amino acid sequences of the CDR1 and the CDR2 as set forth in SEQ ID NO: 101. In some embodiments, the single domain antibody has a CDR1 and a CDR3 having amino acid sequences of the CDR1 and the CDR3 as set forth in SEQ ID NO: 101. In some embodiments, the single domain antibody has a CDR2 and a CDR3 having amino acid sequences of the CDR2 and the CDR3 as set forth in SEQ ID NO: 101. In some embodiments, the single domain antibody has a CDR1, a CDR2, and a CDR3 having amino acid sequences of the CDR1, the CDR2, and the CDR3 as set forth in SEQ ID NO: 101. CDR sequences can be determined according to well-known numbering systems, e.g., as described in Table 1 above. In some embodiments, the CDRs are according to IMGT numbering. In some embodiments, the CDRs are according to Kabat numbering. In some embodiments, the CDRs are according to AbM numbering. In other embodiments, the CDRs are according to Chothia numbering. In other embodiments, the CDRs are according to Contact numbering. In other embodiments, the CDRs are according to a combination of Kabat numbering and Chothia numbering. In some embodiments, the anti-plgR single domain antibody is camelid. In some embodiments, the anti-plgR single domain antibody is humanized. In some embodiments, the anti-plgR single domain antibody comprises an acceptor human framework, e.g., a human immunoglobulin framework or a human consensus framework.

[0391] In some embodiments, the single domain antibody has a CDR1 having an amino acid sequence of the CDR1 as set forth in SEQ ID NO: 102. In some embodiments, the single domain antibody has a CDR2 having an amino acid sequence of the CDR2 as set forth in SEQ ID NO: 102. In other embodiments, the single domain antibody has a CDR3 having an amino acid sequence of the CDR3 as set forth in SEQ ID NO: 102. In some embodiments, the single domain antibody has a CDR1 and a CDR2 having amino acid sequences of the CDR1 and the CDR2 as set forth in SEQ ID NO: 102. In some embodiments, the single domain antibody has a CDR1 and a CDR3 having amino acid sequences of the CDR1 and the CDR3 as set forth in SEQ ID NO: 102. In some embodiments, the single domain antibody has a CDR2 and a CDR3 having amino acid sequences of the CDR2 and the CDR3 as set forth in SEQ ID NO: 102. In some embodiments, the single domain antibody has a CDR1, a CDR2, and a CDR3 having amino acid sequences of the CDR1, the CDR2, and the CDR3 as set forth in SEQ ID NO: 102. CDR sequences can be determined according to well-known numbering systems, e.g., as described in Table 1 above. In some embodiments, the CDRs are according to IMGT numbering. In some embodiments, the CDRs are according to Kabat numbering. In some embodiments, the CDRs are according to AbM numbering. In other embodiments, the CDRs are according to Chothia numbering. In other embodiments, the CDRs are according to Contact numbering. In other embodiments, the CDRs are according to a combination of Kabat numbering and Chothia numbering. In some embodiments, the anti-plgR single domain antibody is camelid. In some embodiments, the anti-plgR single domain antibody is humanized. In some embodiments, the anti-plgR single domain antibody comprises an acceptor human framework, e.g., a human immunoglobulin framework or a human consensus framework.

[0392] In some embodiments, the single domain antibody has a CDR1 having an amino acid sequence of the CDR1 as set forth in SEQ ID NO: 103. In some embodiments, the single domain antibody has a CDR2 having an amino acid sequence of the CDR2 as set forth in SEQ ID NO: 103. In other embodiments, the single domain antibody has a CDR3 having an amino acid sequence of the CDR3 as set forth in SEQ ID NO: 103. In some embodiments, the single domain antibody has a CDR1 and a CDR2 having amino acid sequences of the CDR1 and the CDR2 as set forth in SEQ ID NO: 103. In some embodiments, the single domain antibody has a CDR1 and a CDR3 having amino acid sequences of the CDR1 and the CDR3 as set forth in SEQ ID NO: 103. In some embodiments, the single domain antibody has a CDR2 and a CDR3 having amino acid sequences of the CDR2 and the CDR3 as set forth in SEQ ID NO: 103. In some embodiments, the single domain antibody has a CDR1, a CDR2, and a CDR3 having amino acid sequences of the CDR1, the CDR2, and the CDR3 as set forth in SEQ ID NO: 103. CDR sequences can be determined according to well-known numbering systems, e.g., as described in Table 1 above. In some embodiments, the CDRs are according to IMGT numbering. In some embodiments, the CDRs are according to Kabat numbering. In some embodiments, the CDRs are according to AbM numbering. In other embodiments, the CDRs are according to Chothia numbering. In other embodiments, the CDRs are according to Contact numbering. In other embodiments, the CDRs are according to a combination of Kabat numbering and Chothia numbering. In some embodiments, the anti-plgR single domain antibody is camelid. In some embodiments, the anti-plgR single domain antibody is humanized. In some embodiments, the anti-plgR single domain antibody comprises an acceptor human framework, e.g., a human immunoglobulin framework or a human consensus framework.

[0393] In some embodiments, the single domain antibody has a CDR1 having an amino acid sequence of the CDR1 as set forth in SEQ ID NO: 104. In some embodiments, the single domain antibody has a CDR2 having an amino acid sequence of the CDR2 as set forth in SEQ ID NO: 104. In other embodiments, the single domain antibody has a CDR3 having an amino acid sequence of the CDR3 as set forth in SEQ ID NO: 104. In some embodiments, the single domain antibody has a CDR1 and a CDR2 having amino acid sequences of the CDR1 and the CDR2 as set forth in SEQ ID NO: 104. In some embodiments, the single domain antibody has a CDR1 and a CDR3 having amino acid sequences of the CDR1 and the CDR3 as set forth in SEQ ID NO: 104. In some embodiments, the single domain antibody has a CDR2 and a CDR3 having amino acid sequences of the CDR2 and the CDR3 as set forth in SEQ ID NO: 104. In some embodiments, the single domain antibody has a CDR1, a CDR2, and a CDR3 having amino acid sequences of the CDR1, the CDR2, and the CDR3 as set forth in SEQ ID NO: 104. CDR sequences can be determined according to well-known numbering systems, e.g., as described in Table 1 above. In some embodiments, the CDRs are according to IMGT numbering. In some embodiments, the CDRs are according to Kabat numbering. In some embodiments, the CDRs are according to AbM numbering. In other embodiments, the CDRs are according to Chothia numbering. In other embodiments, the CDRs are according to Contact numbering. In other embodiments, the CDRs are according to a combination of Kabat numbering and Chothia numbering. In some embodiments, the anti-plgR single domain antibody is camelid. In some embodiments, the anti-plgR single domain antibody is humanized. In some embodiments, the anti-plgR single domain antibody comprises an acceptor human framework, e.g., a human immunoglobulin framework or a human consensus framework.

[0394] In some embodiments, the single domain antibody has a CDR1 having an amino acid sequence of the CDR1 as set forth in SEQ ID NO: 105. In some embodiments, the single domain antibody has a CDR2 having an amino acid sequence of the CDR2 as set forth in SEQ ID NO: 105. In other embodiments, the single domain antibody has a CDR3 having an amino acid sequence of the CDR3 as set forth in SEQ ID NO: 105. In some embodiments, the single domain antibody has a CDR1 and a CDR2 having amino acid sequences of the CDR1 and the CDR2 as set forth in SEQ ID NO: 105. In some embodiments, the single domain antibody has a CDR1 and a CDR3 having amino acid sequences of the CDR1 and the CDR3 as set forth in SEQ ID NO: 105. In some embodiments, the single domain antibody has a CDR2 and a CDR3 having amino acid sequences of the CDR2 and the CDR3 as set forth in SEQ ID NO: 105. In some embodiments, the single domain antibody has a CDR1, a CDR2, and a CDR3 having amino acid sequences of the CDR1, the CDR2, and the CDR3 as set forth in SEQ ID NO: 105. CDR sequences can be determined according to well-known numbering systems, e.g., as described in Table 1 above. In some embodiments, the CDRs are according to IMGT numbering. In some embodiments, the CDRs are according to Kabat numbering. In some embodiments, the CDRs are according to AbM numbering. In other embodiments, the CDRs are according to Chothia numbering. In other embodiments, the CDRs are according to Contact numbering. In other embodiments, the CDRs are according to a combination of Kabat numbering and Chothia numbering. In some embodiments, the anti-plgR single domain antibody is camelid. In some embodiments, the anti-plgR single domain antibody is humanized. In some embodiments, the anti-plgR single domain antibody comprises an acceptor human framework, e.g., a human immunoglobulin framework or a human consensus framework.

[0395] In some embodiments, the single domain antibody has a CDR1 having an amino acid sequence of the CDR1 as set forth in SEQ ID NO: 106. In some embodiments, the single domain antibody has a CDR2 having an amino acid sequence of the CDR2 as set forth in SEQ ID NO: 106. In other embodiments, the single domain antibody has a CDR3 having an amino acid sequence of the CDR3 as set forth in SEQ ID NO: 106. In some embodiments, the single domain antibody has a CDR1 and a CDR2 having amino acid sequences of the CDR1 and the CDR2 as set forth in SEQ ID NO: 106. In some embodiments, the single domain antibody has a CDR1 and a CDR3 having amino acid sequences of the CDR1 and the CDR3 as set forth in SEQ ID NO: 106. In some embodiments, the single domain antibody has a CDR2 and a CDR3 having amino acid sequences of the CDR2 and the CDR3 as set forth in SEQ ID NO: 106. In some embodiments, the single domain antibody has a CDR1, a CDR2, and a CDR3 having amino acid sequences of the CDR1, the CDR2, and the CDR3 as set forth in SEQ ID NO: 106. CDR sequences can be determined according to well-known numbering systems, e.g., as described in Table 1 above. In some embodiments, the CDRs are according to IMGT numbering. In some embodiments, the CDRs are according to Kabat numbering. In some embodiments, the CDRs are according to AbM numbering. In other embodiments, the CDRs are according to Chothia numbering. In other embodiments, the CDRs are according to Contact numbering. In other embodiments, the CDRs are according to a combination of Kabat numbering and Chothia numbering. In some embodiments, the anti-plgR single domain antibody is camelid. In some embodiments, the anti-plgR single domain antibody is humanized. In some embodiments, the anti-plgR single domain antibody comprises an acceptor human framework, e.g., a human immunoglobulin framework or a human consensus framework.

[0396] In some embodiments, the single domain antibody has a CDR1 having an amino acid sequence of the CDR1 as set forth in SEQ ID NO: 107. In some embodiments, the single domain antibody has a CDR2 having an amino acid sequence of the CDR2 as set forth in SEQ ID NO: 107. In other embodiments, the single domain antibody has a CDR3 having an amino acid sequence of the CDR3 as set forth in SEQ ID NO: 107. In some embodiments, the single domain antibody has a CDR1 and a CDR2 having amino acid sequences of the CDR1 and the CDR2 as set forth in SEQ ID NO: 107. In some embodiments, the single domain antibody has a CDR1 and a CDR3 having amino acid sequences of the CDR1 and the CDR3 as set forth in SEQ ID NO: 107. In some embodiments, the single domain antibody has a CDR2 and a CDR3 having amino acid sequences of the CDR2 and the CDR3 as set forth in SEQ ID NO: 107. In some embodiments, the single domain antibody has a CDR1, a CDR2, and a CDR3 having amino acid sequences of the CDR1, the CDR2, and the CDR3 as set forth in SEQ ID NO: 107. CDR sequences can be determined according to well-known numbering systems, e.g., as described in Table 1 above. In some embodiments, the CDRs are according to IMGT numbering. In some embodiments, the CDRs are according to Kabat numbering. In some embodiments, the CDRs are according to AbM numbering. In other embodiments, the CDRs are according to Chothia numbering. In other embodiments, the CDRs are according to Contact numbering. In other embodiments, the CDRs are according to a combination of Kabat numbering and Chothia numbering. In some embodiments, the anti-plgR single domain antibody is camelid. In some embodiments, the anti-plgR single domain antibody is humanized. In some embodiments, the anti-plgR single domain antibody comprises an acceptor human framework, e.g., a human immunoglobulin framework or a human consensus framework.

[0397] In some embodiments, the single domain antibody has a CDR1 having an amino acid sequence of the CDR1 as set forth in SEQ ID NO: 108. In some embodiments, the single domain antibody has a CDR2 having an amino acid sequence of the CDR2 as set forth in SEQ ID NO: 108. In other embodiments, the single domain antibody has a CDR3 having an amino acid sequence of the CDR3 as set forth in SEQ ID NO: 108. In some embodiments, the single domain antibody has a CDR1 and a CDR2 having amino acid sequences of the CDR1 and the CDR2 as set forth in SEQ ID NO: 108. In some embodiments, the single domain antibody has a CDR1 and a CDR3 having amino acid sequences of the CDR1 and the CDR3 as set forth in SEQ ID NO: 108. In some embodiments, the single domain antibody has a CDR2 and a CDR3 having amino acid sequences of the CDR2 and the CDR3 as set forth in SEQ ID NO: 108. In some embodiments, the single domain antibody has a CDR1, a CDR2, and a CDR3 having amino acid sequences of the CDR1, the CDR2, and the CDR3 as set forth in SEQ ID NO: 108. CDR sequences can be determined according to well-known numbering systems, e.g., as described in Table 1 above. In some embodiments, the CDRs are according to IMGT numbering. In some embodiments, the CDRs are according to Kabat numbering. In some embodiments, the CDRs are according to AbM numbering. In other embodiments, the CDRs are according to Chothia numbering. In other embodiments, the CDRs are according to Contact numbering. In other embodiments, the CDRs are according to a combination of Kabat numbering and Chothia numbering. In some embodiments, the anti-plgR single domain antibody is camelid. In some embodiments, the anti-plgR single domain antibody is humanized. In some embodiments, the anti-plgR single domain antibody comprises an acceptor human framework, e.g., a human immunoglobulin framework or a human consensus framework.

[0398] In some embodiments, the single domain antibody has a CDR1 having an amino acid sequence of the CDR1 as set forth in SEQ ID NO: 109. In some embodiments, the single domain antibody has a CDR2 having an amino acid sequence of the CDR2 as set forth in SEQ ID NO: 109. In other embodiments, the single domain antibody has a CDR3 having an amino acid sequence of the CDR3 as set forth in SEQ ID NO: 109. In some embodiments, the single domain antibody has a CDR1 and a CDR2 having amino acid sequences of the CDR1 and the CDR2 as set forth in SEQ ID NO: 109. In some embodiments, the single domain antibody has a CDR1 and a CDR3 having amino acid sequences of the CDR1 and the CDR3 as set forth in SEQ ID NO: 109. In some embodiments, the single domain antibody has a CDR2 and a CDR3 having amino acid sequences of the CDR2 and the CDR3 as set forth in SEQ ID NO: 109. In some embodiments, the single domain antibody has a CDR1, a CDR2, and a CDR3 having amino acid sequences of the CDR1, the CDR2, and the CDR3 as set forth in SEQ ID NO: 109. CDR sequences can be determined according to well-known numbering systems, e.g., as described in Table 1 above. In some embodiments, the CDRs are according to IMGT numbering. In some embodiments, the CDRs are according to Kabat numbering. In some embodiments, the CDRs are according to AbM numbering. In other embodiments, the CDRs are according to Chothia numbering. In other embodiments, the CDRs are according to Contact numbering. In other embodiments, the CDRs are according to a combination of Kabat numbering and Chothia numbering. In some embodiments, the anti-plgR single domain antibody is camelid. In some embodiments, the anti-plgR single domain antibody is humanized. In some embodiments, the anti-plgR single domain antibody comprises an acceptor human framework, e.g., a human immunoglobulin framework or a human consensus framework.

[0399] In some embodiments, the single domain antibody has a CDR1 having an amino acid sequence of the CDR1 as set forth in SEQ ID NO: 110. In some embodiments, the single domain antibody has a CDR2 having an amino acid sequence of the CDR2 as set forth in SEQ ID NO: 110. In other embodiments, the single domain antibody has a CDR3 having an amino acid sequence of the CDR3 as set forth in SEQ ID NO: 110. In some embodiments, the single domain antibody has a CDR1 and a CDR2 having amino acid sequences of the CDR1 and the CDR2 as set forth in SEQ ID NO: 110. In some embodiments, the single domain antibody has a CDR1 and a CDR3 having amino acid sequences of the CDR1 and the CDR3 as set forth in SEQ ID NO: 110. In some embodiments, the single domain antibody has a CDR2 and a CDR3 having amino acid sequences of the CDR2 and the CDR3 as set forth in SEQ ID NO: 110. In some embodiments, the single domain antibody has a CDR1, a CDR2, and a CDR3 having amino acid sequences of the CDR1, the CDR2, and the CDR3 as set forth in SEQ ID NO: 110. CDR sequences can be determined according to well-known numbering systems, e.g., as described in Table 1 above. In some embodiments, the CDRs are according to IMGT numbering. In some embodiments, the CDRs are according to Kabat numbering. In some embodiments, the CDRs are according to AbM numbering. In other embodiments, the CDRs are according to Chothia numbering. In other embodiments, the CDRs are according to Contact numbering. In other embodiments, the CDRs are according to a combination of Kabat numbering and Chothia numbering. In some embodiments, the anti-plgR single domain antibody is camelid. In some embodiments, the anti-plgR single domain antibody is humanized. In some embodiments, the anti-plgR single domain antibody comprises an acceptor human framework, e.g., a human immunoglobulin framework or a human consensus framework.

[0400] In some embodiments, the single domain antibody has a CDR1 having an amino acid sequence of the CDR1 as set forth in SEQ ID NO: 111. In some embodiments, the single domain antibody has a CDR2 having an amino acid sequence of the CDR2 as set forth in SEQ ID NO: 111. In other embodiments, the single domain antibody has a CDR3 having an amino acid sequence of the CDR3 as set forth in SEQ ID NO: 111. In some embodiments, the single domain antibody has a CDR1 and a CDR2 having amino acid sequences of the CDR1 and the CDR2 as set forth in SEQ ID NO: 111. In some embodiments, the single domain antibody has a CDR1 and a CDR3 having amino acid sequences of the CDR1 and the CDR3 as set forth in SEQ ID NO: 111. In some embodiments, the single domain antibody has a CDR2 and a CDR3 having amino acid sequences of the CDR2 and the CDR3 as set forth in SEQ ID NO: 111. In some embodiments, the single domain antibody has a CDR1, a CDR2, and a CDR3 having amino acid sequences of the CDR1, the CDR2, and the CDR3 as set forth in SEQ ID NO: 111. CDR sequences can be determined according to well-known numbering systems, e.g., as described in Table 1 above. In some embodiments, the CDRs are according to IMGT numbering. In some embodiments, the CDRs are according to Kabat numbering. In some embodiments, the CDRs are according to AbM numbering. In other embodiments, the CDRs are according to Chothia numbering. In other embodiments, the CDRs are according to Contact numbering. In other embodiments, the CDRs are according to a combination of Kabat numbering and Chothia numbering. In some embodiments, the anti-plgR single domain antibody is camelid. In some embodiments, the anti-plgR single domain antibody is humanized. In some embodiments, the anti-plgR single domain antibody comprises an acceptor human framework, e.g., a human immunoglobulin framework or a human consensus framework.

[0401] In some embodiments, the single domain antibody has a CDR1 having an amino acid sequence of the CDR1 as set forth in SEQ ID NO: 112. In some embodiments, the single domain antibody has a CDR2 having an amino acid sequence of the CDR2 as set forth in SEQ ID NO: 112. In other embodiments, the single domain antibody has a CDR3 having an amino acid sequence of the CDR3 as set forth in SEQ ID NO: 112. In some embodiments, the single domain antibody has a CDR1 and a CDR2 having amino acid sequences of the CDR1 and the CDR2 as set forth in SEQ ID NO: 112. In some embodiments, the single domain antibody has a CDR1 and a CDR3 having amino acid sequences of the CDR1 and the CDR3 as set forth in SEQ ID NO: 112. In some embodiments, the single domain antibody has a CDR2 and a CDR3 having amino acid sequences of the CDR2 and the CDR3 as set forth in SEQ ID NO: 112. In some embodiments, the single domain antibody has a CDR1, a CDR2, and a CDR3 having amino acid sequences of the CDR1, the CDR2, and the CDR3 as set forth in SEQ ID NO: 112. CDR sequences can be determined according to well-known numbering systems, e.g., as described in Table 1 above. In some embodiments, the CDRs are according to IMGT numbering. In some embodiments, the CDRs are according to Kabat numbering. In some embodiments, the CDRs are according to AbM numbering. In other embodiments, the CDRs are according to Chothia numbering. In other embodiments, the CDRs are according to Contact numbering. In other embodiments, the CDRs are according to a combination of Kabat numbering and Chothia numbering. In some embodiments, the anti-plgR single domain antibody is camelid. In some embodiments, the anti-plgR single domain antibody is humanized. In some embodiments, the anti-plgR single domain antibody comprises an acceptor human framework, e.g., a human immunoglobulin framework or a human consensus framework.

[0402] In some embodiments, the single domain antibody has a CDR1 having an amino acid sequence of the CDR1 as set forth in SEQ ID NO: 113. In some embodiments, the single domain antibody has a CDR2 having an amino acid sequence of the CDR2 as set forth in SEQ ID NO: 113. In other embodiments, the single domain antibody has a CDR3 having an amino acid sequence of the CDR3 as set forth in SEQ ID NO: 113. In some embodiments, the single domain antibody has a CDR1 and a CDR2 having amino acid sequences of the CDR1 and the CDR2 as set forth in SEQ ID NO: 113. In some embodiments, the single domain antibody has a CDR1 and a CDR3 having amino acid sequences of the CDR1 and the CDR3 as set forth in SEQ ID NO: 113. In some embodiments, the single domain antibody has a CDR2 and a CDR3 having amino acid sequences of the CDR2 and the CDR3 as set forth in SEQ ID NO: 113. In some embodiments, the single domain antibody has a CDR1, a CDR2, and a CDR3 having amino acid sequences of the CDR1, the CDR2, and the CDR3 as set forth in SEQ ID NO: 113. CDR sequences can be determined according to well-known numbering systems, e.g., as described in Table 1 above. In some embodiments, the CDRs are according to IMGT numbering. In some embodiments, the CDRs are according to Kabat numbering. In some embodiments, the CDRs are according to AbM numbering. In other embodiments, the CDRs are according to Chothia numbering. In other embodiments, the CDRs are according to Contact numbering. In other embodiments, the CDRs are according to a combination of Kabat numbering and Chothia numbering. In some embodiments, the anti-plgR single domain antibody is camelid. In some embodiments, the anti-plgR single domain antibody is humanized. In some embodiments, the anti-plgR single domain antibody comprises an acceptor human framework, e.g., a human immunoglobulin framework or a human consensus framework.

[0403] In some embodiments, the single domain antibody has a CDR1 having an amino acid sequence of the CDR1 as set forth in SEQ ID NO: 114. In some embodiments, the single domain antibody has a CDR2 having an amino acid sequence of the CDR2 as set forth in SEQ ID NO: 114. In other embodiments, the single domain antibody has a CDR3 having an amino acid sequence of the CDR3 as set forth in SEQ ID NO: 114. In some embodiments, the single domain antibody has a CDR1 and a CDR2 having amino acid sequences of the CDR1 and the CDR2 as set forth in SEQ ID NO: 114. In some embodiments, the single domain antibody has a CDR1 and a CDR3 having amino acid sequences of the CDR1 and the CDR3 as set forth in SEQ ID NO: 114. In some embodiments, the single domain antibody has a CDR2 and a CDR3 having amino acid sequences of the CDR2 and the CDR3 as set forth in SEQ ID NO: 114. In some embodiments, the single domain antibody has a CDR1, a CDR2, and a CDR3 having amino acid sequences of the CDR1, the CDR2, and the CDR3 as set forth in SEQ ID NO: 114. CDR sequences can be determined according to well-known numbering systems, e.g., as described in Table 1 above. In some embodiments, the CDRs are according to IMGT numbering. In some embodiments, the CDRs are according to Kabat numbering. In some embodiments, the CDRs are according to AbM numbering. In other embodiments, the CDRs are according to Chothia numbering. In other embodiments, the CDRs are according to Contact numbering. In other embodiments, the CDRs are according to a combination of Kabat numbering and Chothia numbering. In some embodiments, the anti-plgR single domain antibody is camelid. In some embodiments, the anti-plgR single domain antibody is humanized. In some embodiments, the anti-plgR single domain antibody comprises an acceptor human framework, e.g., a human immunoglobulin framework or a human consensus framework.

[0404] In some embodiments, the single domain antibody has a CDR1 having an amino acid sequence of the CDR1 as set forth in SEQ ID NO: 115. In some embodiments, the single domain antibody has a CDR2 having an amino acid sequence of the CDR2 as set forth in SEQ ID NO: 115. In other embodiments, the single domain antibody has a CDR3 having an amino acid sequence of the CDR3 as set forth in SEQ ID NO: 115. In some embodiments, the single domain antibody has a CDR1 and a CDR2 having amino acid sequences of the CDR1 and the CDR2 as set forth in SEQ ID NO: 115. In some embodiments, the single domain antibody has a CDR1 and a CDR3 having amino acid sequences of the CDR1 and the CDR3 as set forth in SEQ ID NO: 115. In some embodiments, the single domain antibody has a CDR2 and a CDR3 having amino acid sequences of the CDR2 and the CDR3 as set forth in SEQ ID NO: 115. In some embodiments, the single domain antibody has a CDR1, a CDR2, and a CDR3 having amino acid sequences of the CDR1, the CDR2, and the CDR3 as set forth in SEQ ID NO: 115. CDR sequences can be determined according to well-known numbering systems, e.g., as described in Table 1 above. In some embodiments, the CDRs are according to IMGT numbering. In some embodiments, the CDRs are according to Kabat numbering. In some embodiments, the CDRs are according to AbM numbering. In other embodiments, the CDRs are according to Chothia numbering. In other embodiments, the CDRs are according to Contact numbering. In other embodiments, the CDRs are according to a combination of Kabat numbering and Chothia numbering. In some embodiments, the anti-plgR single domain antibody is camelid. In some embodiments, the anti-plgR single domain antibody is humanized. In some embodiments, the anti-plgR single domain antibody comprises an acceptor human framework, e.g., a human immunoglobulin framework or a human consensus framework.

[0405] In some embodiments, the single domain antibody has a CDR1 having an amino acid sequence of the CDR1 as set forth in SEQ ID NO: 116. In some embodiments, the single domain antibody has a CDR2 having an amino acid sequence of the CDR2 as set forth in SEQ ID NO: 116. In other embodiments, the single domain antibody has a CDR3 having an amino acid sequence of the CDR3 as set forth in SEQ ID NO: 116. In some embodiments, the single domain antibody has a CDR1 and a CDR2 having amino acid sequences of the CDR1 and the CDR2 as set forth in SEQ ID NO: 116. In some embodiments, the single domain antibody has a CDR1 and a CDR3 having amino acid sequences of the CDR1 and the CDR3 as set forth in SEQ ID NO: 116. In some embodiments, the single domain antibody has a CDR2 and a CDR3 having amino acid sequences of the CDR2 and the CDR3 as set forth in SEQ ID NO: 116. In some embodiments, the single domain antibody has a CDR1, a CDR2, and a CDR3 having amino acid sequences of the CDR1, the CDR2, and the CDR3 as set forth in SEQ ID NO: 116. CDR sequences can be determined according to well-known numbering systems, e.g., as described in Table 1 above. In some embodiments, the CDRs are according to IMGT numbering. In some embodiments, the CDRs are according to Kabat numbering. In some embodiments, the CDRs are according to AbM numbering. In other embodiments, the CDRs are according to Chothia numbering. In other embodiments, the CDRs are according to Contact numbering. In other embodiments, the CDRs are according to a combination of Kabat numbering and Chothia numbering. In some embodiments, the anti-plgR single domain antibody is camelid. In some embodiments, the anti-plgR single domain antibody is humanized. In some embodiments, the anti-plgR single domain antibody comprises an acceptor human framework, e.g., a human immunoglobulin framework or a human consensus framework.

[0406] In some embodiments, the single domain antibody has a CDR1 having an amino acid sequence of the CDR1 as set forth in SEQ ID NO: 117. In some embodiments, the single domain antibody has a CDR2 having an amino acid sequence of the CDR2 as set forth in SEQ ID NO: 117. In other embodiments, the single domain antibody has a CDR3 having an amino acid sequence of the CDR3 as set forth in SEQ ID NO: 117. In some embodiments, the single domain antibody has a CDR1 and a CDR2 having amino acid sequences of the CDR1 and the CDR2 as set forth in SEQ ID NO: 117. In some embodiments, the single domain antibody has a CDR1 and a CDR3 having amino acid sequences of the CDR1 and the CDR3 as set forth in SEQ ID NO: 117. In some embodiments, the single domain antibody has a CDR2 and a CDR3 having amino acid sequences of the CDR2 and the CDR3 as set forth in SEQ ID NO: 117. In some embodiments, the single domain antibody has a CDR1, a CDR2, and a CDR3 having amino acid sequences of the CDR1, the CDR2, and the CDR3 as set forth in SEQ ID NO: 117. CDR sequences can be determined according to well-known numbering systems, e.g., as described in Table 1 above. In some embodiments, the CDRs are according to IMGT numbering. In some embodiments, the CDRs are according to Kabat numbering. In some embodiments, the CDRs are according to AbM numbering. In other embodiments, the CDRs are according to Chothia numbering. In other embodiments, the CDRs are according to Contact numbering. In other embodiments, the CDRs are according to a combination of Kabat numbering and Chothia numbering. In some embodiments, the anti-plgR single domain antibody is camelid. In some embodiments, the anti-plgR single domain antibody is humanized. In some embodiments, the anti-plgR single domain antibody comprises an acceptor human framework, e.g., a human immunoglobulin framework or a human consensus framework.

[0407] In some embodiments, the single domain antibody has a CDR1 having an amino acid sequence of the CDR1 as set forth in SEQ ID NO: 118. In some embodiments, the single domain antibody has a CDR2 having an amino acid sequence of the CDR2 as set forth in SEQ ID NO: 118. In other embodiments, the single domain antibody has a CDR3 having an amino acid sequence of the CDR3 as set forth in SEQ ID NO: 118. In some embodiments, the single domain antibody has a CDR1 and a CDR2 having amino acid sequences of the CDR1 and the CDR2 as set forth in SEQ ID NO: 118. In some embodiments, the single domain antibody has a CDR1 and a CDR3 having amino acid sequences of the CDR1 and the CDR3 as set forth in SEQ ID NO: 118. In some embodiments, the single domain antibody has a CDR2 and a CDR3 having amino acid sequences of the CDR2 and the CDR3 as set forth in SEQ ID NO: 118. In some embodiments, the single domain antibody has a CDR1, a CDR2, and a CDR3 having amino acid sequences of the CDR1, the CDR2, and the CDR3 as set forth in SEQ ID NO: 118. CDR sequences can be determined according to well-known numbering systems, e.g., as described in Table 1 above. In some embodiments, the CDRs are according to IMGT numbering. In some embodiments, the CDRs are according to Kabat numbering. In some embodiments, the CDRs are according to AbM numbering. In other embodiments, the CDRs are according to Chothia numbering. In other embodiments, the CDRs are according to Contact numbering. In other embodiments, the CDRs are according to a combination of Kabat numbering and Chothia numbering. In some embodiments, the anti-plgR single domain antibody is camelid. In some embodiments, the anti-plgR single domain antibody is humanized. In some embodiments, the anti-plgR single domain antibody comprises an acceptor human framework, e.g., a human immunoglobulin framework or a human consensus framework.

[0408] In some embodiments, the single domain antibody has a CDR1 having an amino acid sequence of the CDR1 as set forth in SEQ ID NO: 119. In some embodiments, the single domain antibody has a CDR2 having an amino acid sequence of the CDR2 as set forth in SEQ ID NO: 119. In other embodiments, the single domain antibody has a CDR3 having an amino acid sequence of the CDR3 as set forth in SEQ ID NO: 119. In some embodiments, the single domain antibody has a CDR1 and a CDR2 having amino acid sequences of the CDR1 and the CDR2 as set forth in SEQ ID NO: 119. In some embodiments, the single domain antibody has a CDR1 and a CDR3 having amino acid sequences of the CDR1 and the CDR3 as set forth in SEQ ID NO: 119. In some embodiments, the single domain antibody has a CDR2 and a CDR3 having amino acid sequences of the CDR2 and the CDR3 as set forth in SEQ ID NO: 119. In some embodiments, the single domain antibody has a CDR1, a CDR2, and a CDR3 having amino acid sequences of the CDR1, the CDR2, and the CDR3 as set forth in SEQ ID NO: 119. CDR sequences can be determined according to well-known numbering systems, e.g., as described in Table 1 above. In some embodiments, the CDRs are according to IMGT numbering. In some embodiments, the CDRs are according to Kabat numbering. In some embodiments, the CDRs are according to AbM numbering. In other embodiments, the CDRs are according to Chothia numbering. In other embodiments, the CDRs are according to Contact numbering. In other embodiments, the CDRs are according to a combination of Kabat numbering and Chothia numbering. In some embodiments, the anti-plgR single domain antibody is camelid. In some embodiments, the anti-plgR single domain antibody is humanized. In some embodiments, the anti-plgR single domain antibody comprises an acceptor human framework, e.g., a human immunoglobulin framework or a human consensus framework.

[0409] In some embodiments, the single domain antibody has a CDR1 having an amino acid sequence of the CDR1 as set forth in SEQ ID NO: 120. In some embodiments, the single domain antibody has a CDR2 having an amino acid sequence of the CDR2 as set forth in SEQ ID NO: 120. In other embodiments, the single domain antibody has a CDR3 having an amino acid sequence of the CDR3 as set forth in SEQ ID NO: 120. In some embodiments, the single domain antibody has a CDR1 and a CDR2 having amino acid sequences of the CDR1 and the CDR2 as set forth in SEQ ID NO: 120. In some embodiments, the single domain antibody has a CDR1 and a CDR3 having amino acid sequences of the CDR1 and the CDR3 as set forth in SEQ ID NO: 120. In some embodiments, the single domain antibody has a CDR2 and a CDR3 having amino acid sequences of the CDR2 and the CDR3 as set forth in SEQ ID NO: 120. In some embodiments, the single domain antibody has a CDR1, a CDR2, and a CDR3 having amino acid sequences of the CDR1, the CDR2, and the CDR3 as set forth in SEQ ID NO: 120. CDR sequences can be determined according to well-known numbering systems, e.g., as described in Table 1 above. In some embodiments, the CDRs are according to IMGT numbering. In some embodiments, the CDRs are according to Kabat numbering. In some embodiments, the CDRs are according to AbM numbering. In other embodiments, the CDRs are according to Chothia numbering. In other embodiments, the CDRs are according to Contact numbering. In other embodiments, the CDRs are according to a combination of Kabat numbering and Chothia numbering. In some embodiments, the anti-plgR single domain antibody is camelid. In some embodiments, the anti-plgR single domain antibody is humanized. In some embodiments, the anti-plgR single domain antibody comprises an acceptor human framework, e.g., a human immunoglobulin framework or a human consensus framework.

[0410] In some embodiments, the single domain antibody has a CDR1 having an amino acid sequence of the CDR1 as set forth in SEQ ID NO: 121. In some embodiments, the single domain antibody has a CDR2 having an amino acid sequence of the CDR2 as set forth in SEQ ID NO: 121. In other embodiments, the single domain antibody has a CDR3 having an amino acid sequence of the CDR3 as set forth in SEQ ID NO: 121. In some embodiments, the single domain antibody has a CDR1 and a CDR2 having amino acid sequences of the CDR1 and the CDR2 as set forth in SEQ ID NO: 121. In some embodiments, the single domain antibody has a CDR1 and a CDR3 having amino acid sequences of the CDR1 and the CDR3 as set forth in SEQ ID NO: 121. In some embodiments, the single domain antibody has a CDR2 and a CDR3 having amino acid sequences of the CDR2 and the CDR3 as set forth in SEQ ID NO: 121. In some embodiments, the single domain antibody has a CDR1, a CDR2, and a CDR3 having amino acid sequences of the CDR1, the CDR2, and the CDR3 as set forth in SEQ ID NO: 121. CDR sequences can be determined according to well-known numbering systems, e.g., as described in Table 1 above. In some embodiments, the CDRs are according to IMGT numbering. In some embodiments, the CDRs are according to Kabat numbering. In some embodiments, the CDRs are according to AbM numbering. In other embodiments, the CDRs are according to Chothia numbering. In other embodiments, the CDRs are according to Contact numbering. In other embodiments, the CDRs are according to a combination of Kabat numbering and Chothia numbering. In some embodiments, the anti-plgR single domain antibody is camelid. In some embodiments, the anti-plgR single domain antibody is humanized. In some embodiments, the anti-plgR single domain antibody comprises an acceptor human framework, e.g., a human immunoglobulin framework or a human consensus framework.

[0411] In some embodiments, the single domain antibody has a CDR1 having an amino acid sequence of the CDR1 as set forth in SEQ ID NO: 122. In some embodiments, the single domain antibody has a CDR2 having an amino acid sequence of the CDR2 as set forth in SEQ ID NO: 122. In other embodiments, the single domain antibody has a CDR3 having an amino acid sequence of the CDR3 as set forth in SEQ ID NO: 122. In some embodiments, the single domain antibody has a CDR1 and a CDR2 having amino acid sequences of the CDR1 and the CDR2 as set forth in SEQ ID NO: 122. In some embodiments, the single domain antibody has a CDR1 and a CDR3 having amino acid sequences of the CDR1 and the CDR3 as set forth in SEQ ID NO: 122. In some embodiments, the single domain antibody has a CDR2 and a CDR3 having amino acid sequences of the CDR2 and the CDR3 as set forth in SEQ ID NO: 122. In some embodiments, the single domain antibody has a CDR1, a CDR2, and a CDR3 having amino acid sequences of the CDR1, the CDR2, and the CDR3 as set forth in SEQ ID NO: 122. CDR sequences can be determined according to well-known numbering systems, e.g., as described in Table 1 above. In some embodiments, the CDRs are according to IMGT numbering. In some embodiments, the CDRs are according to Kabat numbering. In some embodiments, the CDRs are according to AbM numbering. In other embodiments, the CDRs are according to Chothia numbering. In other embodiments, the CDRs are according to Contact numbering. In other embodiments, the CDRs are according to a combination of Kabat numbering and Chothia numbering. In some embodiments, the anti-plgR single domain antibody is camelid. In some embodiments, the anti-plgR single domain antibody is humanized. In some embodiments, the anti-plgR single domain antibody comprises an acceptor human framework, e.g., a human immunoglobulin framework or a human consensus framework.

[0412] In some embodiments, provided herein is a single domain antibody that binds to plgR comprising the following structure: FR1-CDR1-FR2-CDR2-FR3-CDR3-FR4, wherein (i) the CDR1 comprises an amino acid sequence of a CDR1 set forth in SEQ ID NOs: 1 to 122, (ii) the CDR2 comprises an amino acid sequence of a CDR2 set forth in SEQ ID NOs: 1 to 122, and/or (iii) the CDR3 comprises an amino acid sequence of a CDR3 set forth in SEQ ID Nos: 1 to 100. In some embodiments, the anti-plgR single domain antibody is camelid. In some embodiments, the anti-plgR single domain antibody is humanized. In some embodiments, the anti-plgR single domain antibody comprises an acceptor human framework, e.g., a human immunoglobulin framework or a human consensus framework.

[0413] In other embodiments, provided herein is a single domain antibody that binds to plgR comprising the following structure: FR1-CDR1-FR2-CDR2-FR3-CDR3-FR4, wherein (i) the CDR1 comprises an amino acid sequence having at least 75%, 80%, 85%, 86%, 87%, 88%, 89%, 90%, 91%, 92%, 93%, 94%, 95%, 96%, 97%, 98%, or 99% sequence identity to a CDR1 set forth in SEQ ID NOs: 1 to 122; (ii) the CDR2 comprises an amino acid sequence having at least 75%, 80%, 85%, 86%, 87%, 88%, 89%, 90%, 91%, 92%, 93%, 94%, 95%, 96%, 97%, 98%, or 99% sequence identity to a CDR1 set forth in SEQ ID NOs: 1 to 122; and/or (iii) the CDR3 comprises an amino acid sequence having at least 75%, 80%, 85%, 86%, 87%, 88%, 89%, 90%, 91%, 92%, 93%, 94%, 95%, 96%, 97%, 98%, or 99% sequence identity to a CDR1 set forth in SEQ ID NOs: 1 to 122. In some embodiments, the anti-plgR single domain antibody is camelid. In some embodiments, the anti-plgR single domain antibody is humanized. In some embodiments, the anti-plgR single domain antibody comprises an acceptor human framework, e.g., a human immunoglobulin framework or a human consensus framework.

[0414] In some embodiments, the single domain antibody provided herein comprises a CDR1 comprising an amino acid sequence of SEQ ID NO: 123; a CDR2 comprising an amino acid sequence of SEQ ID NO: 124; and a CDR3 comprising an amino acid sequence of SEQ ID NO: 125. In some embodiments, the single domain antibody provided herein comprises a CDR1 comprising an amino acid sequence of SEQ ID NO: 126; a CDR2 comprising an amino acid sequence of SEQ ID NO: 127; and a CDR3 comprising an amino acid sequence of SEQ ID NO: 128. In some embodiments, the single domain antibody provided herein comprises a CDR1 comprising an amino acid sequence of SEQ ID NO: 129; a CDR2 comprising an amino acid sequence of SEQ ID NO: 130; and a CDR3 comprising an amino acid sequence of SEQ ID NO: 131. In some embodiments, the single domain antibody provided herein comprises a CDR1 comprising an amino acid sequence of SEQ ID NO: 132; a CDR2 comprising an amino acid sequence of SEQ ID NO: 133; and a CDR3 comprising an amino acid sequence of SEQ ID NO: 134. In some embodiments, the single domain antibody provided herein comprises a CDR1 comprising an amino acid sequence of SEQ ID NO: 135; a CDR2 comprising an amino acid sequence of SEQ ID NO: 136; and a CDR3 comprising an amino acid sequence of SEQ ID NO: 137. In some embodiments, the single domain antibody provided herein comprises a CDR1 comprising an amino acid sequence of SEQ ID NO: 138; a CDR2 comprising an amino acid sequence of SEQ ID NO: 139; and a CDR3 comprising an amino acid sequence of SEQ ID NO: 140. In some embodiments, the single domain antibody provided herein comprises a CDR1 comprising an amino acid sequence of SEQ ID NO: 141; a CDR2 comprising an amino acid sequence of SEQ ID NO: 142; and a CDR3 comprising an amino acid sequence of SEQ ID NO: 143. In some embodiments, the single domain antibody provided herein comprises a CDR1 comprising an amino acid sequence of SEQ ID NO: 144; a CDR2 comprising an amino acid sequence of SEQ ID NO: 145; and a CDR3 comprising an amino acid sequence of SEQ ID NO: 146. In some embodiments, the single domain antibody provided herein comprises a CDR1 comprising an amino acid sequence of SEQ ID NO: 147; a CDR2 comprising an amino acid sequence of SEQ ID NO: 148; and a CDR3 comprising an amino acid sequence of SEQ ID NO: 149. In some embodiments, the single domain antibody provided herein comprises a CDR1 comprising an amino acid sequence of SEQ ID NO: 150; a CDR2 comprising an amino acid sequence of SEQ ID NO: 151; and a CDR3 comprising an amino acid sequence of SEQ ID NO: 152. In some embodiments, the single domain antibody provided herein comprises a CDR1 comprising an amino acid sequence of SEQ ID NO: 153; a CDR2 comprising an amino acid sequence of SEQ ID NO: 154; and a CDR3 comprising an amino acid sequence of SEQ ID NO: 155. In some embodiments, the single domain antibody provided herein comprises a CDR1 comprising an amino acid sequence of SEQ ID NO: 156; a CDR2 comprising an amino acid sequence of SEQ ID NO: 157; and a CDR3 comprising an amino acid sequence of SEQ ID NO: 158. In some embodiments, the single domain antibody provided herein comprises a CDR1 comprising an amino acid sequence of SEQ ID NO: 159; a CDR2 comprising an amino acid sequence of SEQ ID NO: 160; and a CDR3 comprising an amino acid sequence of SEQ ID NO: 161. In some embodiments, the single domain antibody provided herein comprises a CDR1 comprising an amino acid sequence of SEQ ID NO: 162; a CDR2 comprising an amino acid sequence of SEQ ID NO: 163; and a CDR3 comprising an amino acid sequence of SEQ ID NO: 164. In some embodiments, the single domain antibody provided herein comprises a CDR1 comprising an amino acid sequence of SEQ ID NO: 165; a CDR2 comprising an amino acid sequence of SEQ ID NO: 166; and a CDR3 comprising an amino acid sequence of SEQ ID NO: 167. In some embodiments, the single domain antibody provided herein comprises a CDR1 comprising an amino acid sequence of SEQ ID NO: 168; a CDR2 comprising an amino acid sequence of SEQ ID NO: 169; and a CDR3 comprising an amino acid sequence of SEQ ID NO: 170. In some embodiments, the single domain antibody provided herein comprises a CDR1 comprising an amino acid sequence of SEQ ID NO: 171; a CDR2 comprising an amino acid sequence of SEQ ID NO: 172; and a CDR3 comprising an amino acid sequence of SEQ ID NO: 173. In some embodiments, the single domain antibody provided herein comprises a CDR1 comprising an amino acid sequence of SEQ ID NO: 174; a CDR2 comprising an amino acid sequence of SEQ ID NO: 175; and a CDR3 comprising an amino acid sequence of SEQ ID NO: 176. In some embodiments, the single domain antibody provided herein comprises a CDR1 comprising an amino acid sequence of SEQ ID NO: 177; a CDR2 comprising an amino acid sequence of SEQ ID NO: 178; and a CDR3 comprising an amino acid sequence of SEQ ID NO: 179. In some embodiments, the single domain antibody provided herein comprises a CDR1 comprising an amino acid sequence of SEQ ID NO: 180; a CDR2 comprising an amino acid sequence of SEQ ID NO: 181; and a CDR3 comprising an amino acid sequence of SEQ ID NO: 182. In some embodiments, the single domain antibody provided herein comprises a CDR1 comprising an amino acid sequence of SEQ ID NO: 183; a CDR2 comprising an amino acid sequence of SEQ ID NO: 184; and a CDR3 comprising an amino acid sequence of SEQ ID NO: 185. In some embodiments, the single domain antibody provided herein comprises a CDR1 comprising an amino acid sequence of SEQ ID NO: 186; a CDR2 comprising an amino acid sequence of SEQ ID NO: 187; and a CDR3 comprising an amino acid sequence of SEQ ID NO: 188. In some embodiments, the single domain antibody provided herein comprises a CDR1 comprising an amino acid sequence of SEQ ID NO: 189; a CDR2 comprising an amino acid sequence of SEQ ID NO: 190; and a CDR3 comprising an amino acid sequence of SEQ ID NO: 191. In some embodiments, the single domain antibody provided herein comprises a CDR1 comprising an amino acid sequence of SEQ ID NO: 192; a CDR2 comprising an amino acid sequence of SEQ ID NO: 193; and a CDR3 comprising an amino acid sequence of SEQ ID NO: 194. In some embodiments, the single domain antibody provided herein comprises a CDR1 comprising an amino acid sequence of SEQ ID NO: 195; a CDR2 comprising an amino acid sequence of SEQ ID NO: 196; and a CDR3 comprising an amino acid sequence of SEQ ID NO: 197. In some embodiments, the single domain antibody provided herein comprises a CDR1 comprising an amino acid sequence of SEQ ID NO: 198; a CDR2 comprising an amino acid sequence of SEQ ID NO: 199; and a CDR3 comprising an amino acid sequence of SEQ ID NO: 200. In some embodiments, the single domain antibody provided herein comprises a CDR1 comprising an amino acid sequence of SEQ ID NO: 201; a CDR2 comprising an amino acid sequence of SEQ ID NO: 202; and a CDR3 comprising an amino acid sequence of SEQ ID NO: 203. In some embodiments, the single domain antibody provided herein comprises a CDR1 comprising an amino acid sequence of SEQ ID NO: 204; a CDR2 comprising an amino acid sequence of SEQ ID NO: 205; and a CDR3 comprising an amino acid sequence of SEQ ID NO: 206. In some embodiments, the single domain antibody provided herein comprises a CDR1 comprising an amino acid sequence of SEQ ID NO: 207; a CDR2 comprising an amino acid sequence of SEQ ID NO: 208; and a CDR3 comprising an amino acid sequence of SEQ ID NO: 209. In some embodiments, the single domain antibody provided herein comprises a CDR1 comprising an amino acid sequence of SEQ ID NO: 210; a CDR2 comprising an amino acid sequence of SEQ ID NO: 211; and a CDR3 comprising an amino acid sequence of SEQ ID NO: 212. In some embodiments, the single domain antibody provided herein comprises a CDR1 comprising an amino acid sequence of SEQ ID NO: 213; a CDR2 comprising an amino acid sequence of SEQ ID NO: 214; and a CDR3 comprising an amino acid sequence of SEQ ID NO: 215. In some embodiments, the single domain antibody provided herein comprises a CDR1 comprising an amino acid sequence of SEQ ID NO: 216; a CDR2 comprising an amino acid sequence of SEQ ID NO: 217; and a CDR3 comprising an amino acid sequence of SEQ ID NO: 218. In some embodiments, the single domain antibody provided herein comprises a CDR1 comprising an amino acid sequence of SEQ ID NO: 219; a CDR2 comprising an amino acid sequence of SEQ ID NO: 220; and a CDR3 comprising an amino acid sequence of SEQ ID NO: 221. In some embodiments, the single domain antibody provided herein comprises a CDR1 comprising an amino acid sequence of SEQ ID NO: 222; a CDR2 comprising an amino acid sequence of SEQ ID NO: 223; and a CDR3 comprising an amino acid sequence of SEQ ID NO: 224. In some embodiments, the single domain antibody provided herein comprises a CDR1 comprising an amino acid sequence of SEQ ID NO: 225; a CDR2 comprising an amino acid sequence of SEQ ID NO: 226; and a CDR3 comprising an amino acid sequence of SEQ ID NO: 227. In some embodiments, the single domain antibody provided herein comprises a CDR1 comprising an amino acid sequence of SEQ ID NO: 228; a CDR2 comprising an amino acid sequence of SEQ ID NO: 229; and a CDR3 comprising an amino acid sequence of SEQ ID NO: 230. In some embodiments, the single domain antibody provided herein comprises a CDR1 comprising an amino acid sequence of SEQ ID NO: 231; a CDR2 comprising an amino acid sequence of SEQ ID NO: 232; and a CDR3 comprising an amino acid sequence of SEQ ID NO: 233. In some embodiments, the single domain antibody provided herein comprises a CDR1 comprising an amino acid sequence of SEQ ID NO: 234; a CDR2 comprising an amino acid sequence of SEQ ID NO: 235; and a CDR3 comprising an amino acid sequence of SEQ ID NO: 236. In some embodiments, the single domain antibody provided herein comprises a CDR1 comprising an amino acid sequence of SEQ ID NO: 237; a CDR2 comprising an amino acid sequence of SEQ ID NO: 238; and a CDR3 comprising an amino acid sequence of SEQ ID NO: 239. In some embodiments, the single domain antibody provided herein comprises a CDR1 comprising an amino acid sequence of SEQ ID NO: 240; a CDR2 comprising an amino acid sequence of SEQ ID NO: 241; and a CDR3 comprising an amino acid sequence of SEQ ID NO: 242. In some embodiments, the single domain antibody provided herein comprises a CDR1 comprising an amino acid sequence of SEQ ID NO: 243; a CDR2 comprising an amino acid sequence of SEQ ID NO: 244; and a CDR3 comprising an amino acid sequence of SEQ ID NO: 245. In some embodiments, the single domain antibody provided herein comprises a CDR1 comprising an amino acid sequence of SEQ ID NO: 246; a CDR2 comprising an amino acid sequence of SEQ ID NO: 247; and a CDR3 comprising an amino acid sequence of SEQ ID NO: 248. In some embodiments, the single domain antibody provided herein comprises a CDR1 comprising an amino acid sequence of SEQ ID NO: 249; a CDR2 comprising an amino acid sequence of SEQ ID NO: 250; and a CDR3 comprising an amino acid sequence of SEQ ID NO: 251. In some embodiments, the single domain antibody provided herein comprises a CDR1 comprising an amino acid sequence of SEQ ID NO: 252; a CDR2 comprising an amino acid sequence of SEQ ID NO: 253; and a CDR3 comprising an amino acid sequence of SEQ ID NO: 254. In some embodiments, the single domain antibody provided herein comprises a CDR1 comprising an amino acid sequence of SEQ ID NO: 255; a CDR2 comprising an amino acid sequence of SEQ ID NO: 256; and a CDR3 comprising an amino acid sequence of SEQ ID NO: 257. In some embodiments, the single domain antibody provided herein comprises a CDR1 comprising an amino acid sequence of SEQ ID NO: 258; a CDR2 comprising an amino acid sequence of SEQ ID NO: 259; and a CDR3 comprising an amino acid sequence of SEQ ID NO: 260. In some embodiments, the single domain antibody provided herein comprises a CDR1 comprising an amino acid sequence of SEQ ID NO: 261; a CDR2 comprising an amino acid sequence of SEQ ID NO: 262; and a CDR3 comprising an amino acid sequence of SEQ ID NO: 263. In some embodiments, the single domain antibody provided herein comprises a CDR1 comprising an amino acid sequence of SEQ ID NO: 264; a CDR2 comprising an amino acid sequence of SEQ ID NO: 265; and a CDR3 comprising an amino acid sequence of SEQ ID NO: 266. In some embodiments, the single domain antibody provided herein comprises a CDR1 comprising an amino acid sequence of SEQ ID NO: 267; a CDR2 comprising an amino acid sequence of SEQ ID NO: 268; and a CDR3 comprising an amino acid sequence of SEQ ID NO: 269. In some embodiments, the single domain antibody provided herein comprises a CDR1 comprising an amino acid sequence of SEQ ID NO: 270; a CDR2 comprising an amino acid sequence of SEQ ID NO: 271; and a CDR3 comprising an amino acid sequence of SEQ ID NO: 272. In some embodiments, the single domain antibody provided herein comprises a CDR1 comprising an amino acid sequence of SEQ ID NO: 273; a CDR2 comprising an amino acid sequence of SEQ ID NO: 274; and a CDR3 comprising an amino acid sequence of SEQ ID NO: 275. In some embodiments, the single domain antibody provided herein comprises a CDR1 comprising an amino acid sequence of SEQ ID NO: 276; a CDR2 comprising an amino acid sequence of SEQ ID NO: 277; and a CDR3 comprising an amino acid sequence of SEQ ID NO: 278. In some embodiments, the single domain antibody provided herein comprises a CDR1 comprising an amino acid sequence of SEQ ID NO: 279; a CDR2 comprising an amino acid sequence of SEQ ID NO: 280; and a CDR3 comprising an amino acid sequence of SEQ ID NO: 281. In some embodiments, the single domain antibody provided herein comprises a CDR1 comprising an amino acid sequence of SEQ ID NO: 282; a CDR2 comprising an amino acid sequence of SEQ ID NO: 283; and a CDR3 comprising an amino acid sequence of SEQ ID NO: 284. In some embodiments, the single domain antibody provided herein comprises a CDR1 comprising an amino acid sequence of SEQ ID NO: 285; a CDR2 comprising an amino acid sequence of SEQ ID NO: 286; and a CDR3 comprising an amino acid sequence of SEQ ID NO: 287. In some embodiments, the single domain antibody provided herein comprises a CDR1 comprising an amino acid sequence of SEQ ID NO: 288; a CDR2 comprising an amino acid sequence of SEQ ID NO: 289; and a CDR3 comprising an amino acid sequence of SEQ ID NO: 290. In some embodiments, the single domain antibody provided herein comprises a CDR1 comprising an amino acid sequence of SEQ ID NO: 291; a CDR2 comprising an amino acid sequence of SEQ ID NO: 292; and a CDR3 comprising an amino acid sequence of SEQ ID NO: 293. In some embodiments, the single domain antibody provided herein comprises a CDR1 comprising an amino acid sequence of SEQ ID NO: 294; a CDR2 comprising an amino acid sequence of SEQ ID NO: 295; and a CDR3 comprising an amino acid sequence of SEQ ID NO: 296. In some embodiments, the single domain antibody provided herein comprises a CDR1 comprising an amino acid sequence of SEQ ID NO: 297; a CDR2 comprising an amino acid sequence of SEQ ID NO: 298; and a CDR3 comprising an amino acid sequence of SEQ ID NO: 299. In some embodiments, the single domain antibody provided herein comprises a CDR1 comprising an amino acid sequence of SEQ ID NO: 300; a CDR2 comprising an amino acid sequence of SEQ ID NO: 301; and a CDR3 comprising an amino acid sequence of SEQ ID NO: 302. In some embodiments, the single domain antibody provided herein comprises a CDR1 comprising an amino acid sequence of SEQ ID NO: 303; a CDR2 comprising an amino acid sequence of SEQ ID NO: 304; and a CDR3 comprising an amino acid sequence of SEQ ID NO: 305. In some embodiments, the single domain antibody provided herein comprises a CDR1 comprising an amino acid sequence of SEQ ID NO: 306; a CDR2 comprising an amino acid sequence of SEQ ID NO: 307; and a CDR3 comprising an amino acid sequence of SEQ ID NO: 308. In some embodiments, the single domain antibody provided herein comprises a CDR1 comprising an amino acid sequence of SEQ ID NO: 309; a CDR2 comprising an amino acid sequence of SEQ ID NO: 310; and a CDR3 comprising an amino acid sequence of SEQ ID NO: 311. In some embodiments, the single domain antibody provided herein comprises a CDR1 comprising an amino acid sequence of SEQ ID NO: 312; a CDR2 comprising an amino acid sequence of SEQ ID NO: 313; and a CDR3 comprising an amino acid sequence of SEQ ID NO: 314. In some embodiments, the single domain antibody provided herein comprises a CDR1 comprising an amino acid sequence of SEQ ID NO: 315; a CDR2 comprising an amino acid sequence of SEQ ID NO: 316; and a CDR3 comprising an amino acid sequence of SEQ ID NO: 317. In some embodiments, the single domain antibody provided herein comprises a CDR1 comprising an amino acid sequence of SEQ ID NO: 318; a CDR2 comprising an amino acid sequence of SEQ ID NO: 319; and a CDR3 comprising an amino acid sequence of SEQ ID NO: 320. In some embodiments, the single domain antibody provided herein comprises a CDR1 comprising an amino acid sequence of SEQ ID NO: 321; a CDR2 comprising an amino acid sequence of SEQ ID NO: 322; and a CDR3 comprising an amino acid sequence of SEQ ID NO: 323. In some embodiments, the single domain antibody provided herein comprises a CDR1 comprising an amino acid sequence of SEQ ID NO: 324; a CDR2 comprising an amino acid sequence of SEQ ID NO: 325; and a CDR3 comprising an amino acid sequence of SEQ ID NO: 326. In some embodiments, the single domain antibody provided herein comprises a CDR1 comprising an amino acid sequence of SEQ ID NO: 327; a CDR2 comprising an amino acid sequence of SEQ ID NO: 328; and a CDR3 comprising an amino acid sequence of SEQ ID NO: 329. In some embodiments, the single domain antibody provided herein comprises a CDR1 comprising an amino acid sequence of SEQ ID NO: 330; a CDR2 comprising an amino acid sequence of SEQ ID NO: 331; and a CDR3 comprising an amino acid sequence of SEQ ID NO: 332. In some embodiments, the single domain antibody provided herein comprises a CDR1 comprising an amino acid sequence of SEQ ID NO: 333; a CDR2 comprising an amino acid sequence of SEQ ID NO: 334; and a CDR3 comprising an amino acid sequence of SEQ ID NO: 335. In some embodiments, the single domain antibody provided herein comprises a CDR1 comprising an amino acid sequence of SEQ ID NO: 336; a CDR2 comprising an amino acid sequence of SEQ ID NO: 337; and a CDR3 comprising an amino acid sequence of SEQ ID NO: 338. In some embodiments, the single domain antibody provided herein comprises a CDR1 comprising an amino acid sequence of SEQ ID NO: 339; a CDR2 comprising an amino acid sequence of SEQ ID NO: 340; and a CDR3 comprising an amino acid sequence of SEQ ID NO: 341. In some embodiments, the single domain antibody provided herein comprises a CDR1 comprising an amino acid sequence of SEQ ID NO: 342; a CDR2 comprising an amino acid sequence of SEQ ID NO: 343; and a CDR3 comprising an amino acid sequence of SEQ ID NO: 344. In some embodiments, the single domain antibody provided herein comprises a CDR1 comprising an amino acid sequence of SEQ ID NO: 345; a CDR2 comprising an amino acid sequence of SEQ ID NO: 346; and a CDR3 comprising an amino acid sequence of SEQ ID NO: 347. In some embodiments, the single domain antibody provided herein comprises a CDR1 comprising an amino acid sequence of SEQ ID NO: 348; a CDR2 comprising an amino acid sequence of SEQ ID NO: 349; and a CDR3 comprising an amino acid sequence of SEQ ID NO: 350. In some embodiments, the single domain antibody provided herein comprises a CDR1 comprising an amino acid sequence of SEQ ID NO: 351; a CDR2 comprising an amino acid sequence of SEQ ID NO: 352; and a CDR3 comprising an amino acid sequence of SEQ ID NO: 353. In some embodiments, the single domain antibody provided herein comprises a CDR1 comprising an amino acid sequence of SEQ ID NO: 354; a CDR2 comprising an amino acid sequence of SEQ ID NO: 355; and a CDR3 comprising an amino acid sequence of SEQ ID NO: 356. In some embodiments, the single domain antibody provided herein comprises a CDR1 comprising an amino acid sequence of SEQ ID NO: 357; a CDR2 comprising an amino acid sequence of SEQ ID NO: 358; and a CDR3 comprising an amino acid sequence of SEQ ID NO: 359. In some embodiments, the single domain antibody provided herein comprises a CDR1 comprising an amino acid sequence of SEQ ID NO: 360; a CDR2 comprising an amino acid sequence of SEQ ID NO: 361; and a CDR3 comprising an amino acid sequence of SEQ ID NO: 362. In some embodiments, the single domain antibody provided herein comprises a CDR1 comprising an amino acid sequence of SEQ ID NO: 363; a CDR2 comprising an amino acid sequence of SEQ ID NO: 364; and a CDR3 comprising an amino acid sequence of SEQ ID NO: 365. In some embodiments, the single domain antibody provided herein comprises a CDR1 comprising an amino acid sequence of SEQ ID NO: 366; a CDR2 comprising an amino acid sequence of SEQ ID NO: 367; and a CDR3 comprising an amino acid sequence of SEQ ID NO: 368. In some embodiments, the single domain antibody provided herein comprises a CDR1 comprising an amino acid sequence of SEQ ID NO: 369; a CDR2 comprising an amino acid sequence of SEQ ID NO: 370; and a CDR3 comprising an amino acid sequence of SEQ ID NO: 371. In some embodiments, the single domain antibody provided herein comprises a CDR1 comprising an amino acid sequence of SEQ ID NO: 372; a CDR2 comprising an amino acid sequence of SEQ ID NO: 373; and a CDR3 comprising an amino acid sequence of SEQ ID NO: 374. In some embodiments, the single domain antibody provided herein comprises a CDR1 comprising an amino acid sequence of SEQ ID NO: 375; a CDR2 comprising an amino acid sequence of SEQ ID NO: 376; and a CDR3 comprising an amino acid sequence of SEQ ID NO: 377. In some embodiments, the single domain antibody provided herein comprises a CDR1 comprising an amino acid sequence of SEQ ID NO: 378; a CDR2 comprising an amino acid sequence of SEQ ID NO: 379; and a CDR3 comprising an amino acid sequence of SEQ ID NO: 380. In some embodiments, the single domain antibody provided herein comprises a CDR1 comprising an amino acid sequence of SEQ ID NO: 381; a CDR2 comprising an amino acid sequence of SEQ ID NO: 382; and a CDR3 comprising an amino acid sequence of SEQ ID NO: 383. In some embodiments, the single domain antibody provided herein comprises a CDR1 comprising an amino acid sequence of SEQ ID NO: 384; a CDR2 comprising an amino acid sequence of SEQ ID NO: 385; and a CDR3 comprising an amino acid sequence of SEQ ID NO: 386. In some embodiments, the single domain antibody provided herein comprises a CDR1 comprising an amino acid sequence of SEQ ID NO: 387; a CDR2 comprising an amino acid sequence of SEQ ID NO: 388; and a CDR3 comprising an amino acid sequence of SEQ ID NO: 389. In some embodiments, the single domain antibody provided herein comprises a CDR1 comprising an amino acid sequence of SEQ ID NO: 390; a CDR2 comprising an amino acid sequence of SEQ ID NO: 391; and a CDR3 comprising an amino acid sequence of SEQ ID NO: 392. In some embodiments, the single domain antibody provided herein comprises a CDR1 comprising an amino acid sequence of SEQ ID NO: 393; a CDR2 comprising an amino acid sequence of SEQ ID NO: 394; and a CDR3 comprising an amino acid sequence of SEQ ID NO: 395. In some embodiments, the single domain antibody provided herein comprises a CDR1 comprising an amino acid sequence of SEQ ID NO: 396; a CDR2 comprising an amino acid sequence of SEQ ID NO: 397; and a CDR3 comprising an amino acid sequence of SEQ ID NO: 398. In some embodiments, the single domain antibody provided herein comprises a CDR1 comprising an amino acid sequence of SEQ ID NO: 399; a CDR2 comprising an amino acid sequence of SEQ ID NO: 400; and a CDR3 comprising an amino acid sequence of SEQ ID NO: 401. In some embodiments, the single domain antibody provided herein comprises a CDR1 comprising an amino acid sequence of SEQ ID NO: 402; a CDR2 comprising an amino acid sequence of SEQ ID NO: 403; and a CDR3 comprising an amino acid sequence of SEQ ID NO: 404. In some embodiments, the single domain antibody provided herein comprises a CDR1 comprising an amino acid sequence of SEQ ID NO: 405; a CDR2 comprising an amino acid sequence of SEQ ID NO: 406; and a CDR3 comprising an amino acid sequence of SEQ ID NO: 407. In some embodiments, the single domain antibody provided herein comprises a CDR1 comprising an amino acid sequence of SEQ ID NO: 408; a CDR2 comprising an amino acid sequence of SEQ ID NO: 409; and a CDR3 comprising an amino acid sequence of SEQ ID NO: 410. In some embodiments, the single domain antibody provided herein comprises a CDR1 comprising an amino acid sequence of SEQ ID NO: 411; a CDR2 comprising an amino acid sequence of SEQ ID NO: 412; and a CDR3 comprising an amino acid sequence of SEQ ID NO: 413. In some embodiments, the single domain antibody provided herein comprises a CDR1 comprising an amino acid sequence of SEQ ID NO: 414; a CDR2 comprising an amino acid sequence of SEQ ID NO: 415; and a CDR3 comprising an amino acid sequence of SEQ ID NO: 416. In some embodiments, the single domain antibody provided herein comprises a CDR1 comprising an amino acid sequence of SEQ ID NO: 417; a CDR2 comprising an amino acid sequence of SEQ ID NO: 418; and a CDR3 comprising an amino acid sequence of SEQ ID NO: 419. In some embodiments, the single domain antibody provided herein comprises a CDR1 comprising an amino acid sequence of SEQ ID NO: 420; a CDR2 comprising an amino acid sequence of SEQ ID NO: 421; and a CDR3 comprising an amino acid sequence of SEQ ID NO: 422. In some embodiments, the single domain antibody provided herein comprises a CDR1 comprising an amino acid sequence of SEQ ID NO: 423; a CDR2 comprising an amino acid sequence of SEQ ID NO: 424; and a CDR3 comprising an amino acid sequence of SEQ ID NO: 425. In some embodiments, the single domain antibody provided herein comprises a CDR1 comprising an amino acid sequence of SEQ ID NO: 426; a CDR2 comprising an amino acid sequence of SEQ ID NO: 427; and a CDR3 comprising an amino acid sequence of SEQ ID NO: 428. In some embodiments, the single domain antibody provided herein comprises a CDR1 comprising an amino acid sequence of SEQ ID NO: 429; a CDR2 comprising an amino acid sequence of SEQ ID NO: 430; and a CDR3 comprising an amino acid sequence of SEQ ID NO: 431. In some embodiments, the single domain antibody provided herein comprises a CDR1 comprising an amino acid sequence of SEQ ID NO: 432; a CDR2 comprising an amino acid sequence of SEQ ID NO: 433; and a CDR3 comprising an amino acid sequence of SEQ ID NO: 434. In some embodiments, the single domain antibody provided herein comprises a CDR1 comprising an amino acid sequence of SEQ ID NO: 435; a CDR2 comprising an amino acid sequence of SEQ ID NO: 436; and a CDR3 comprising an amino acid sequence of SEQ ID NO: 437. In some embodiments, the single domain antibody provided herein comprises a CDR1 comprising an amino acid sequence of SEQ ID NO: 438; a CDR2 comprising an amino acid sequence of SEQ ID NO: 439; and a CDR3 comprising an amino acid sequence of SEQ ID NO: 440. In some embodiments, the single domain antibody provided herein comprises a CDR1 comprising an amino acid sequence of SEQ ID NO: 441; a CDR2 comprising an amino acid sequence of SEQ ID NO: 442; and a CDR3 comprising an amino acid sequence of SEQ ID NO: 443. In some embodiments, the single domain antibody provided herein comprises a CDR1 comprising an amino acid sequence of SEQ ID NO: 444; a CDR2 comprising an amino acid sequence of SEQ ID NO: 445; and a CDR3 comprising an amino acid sequence of SEQ ID NO: 446. In some embodiments, the single domain antibody provided herein comprises a CDR1 comprising an amino acid sequence of SEQ ID NO: 447; a CDR2 comprising an amino acid sequence of SEQ ID NO: 448; and a CDR3 comprising an amino acid sequence of SEQ ID NO: 449. In some embodiments, the single domain antibody provided herein comprises a CDR1 comprising an amino acid sequence of SEQ ID NO: 450; a CDR2 comprising an amino acid sequence of SEQ ID NO: 451; and a CDR3 comprising an amino acid sequence of SEQ ID NO: 452. In some embodiments, the single domain antibody provided herein comprises a CDR1 comprising an amino acid sequence of SEQ ID NO: 453; a CDR2 comprising an amino acid sequence of SEQ ID NO: 454; and a CDR3 comprising an amino acid sequence of SEQ ID NO: 455. In some embodiments, the single domain antibody provided herein comprises a CDR1 comprising an amino acid sequence of SEQ ID NO: 456; a CDR2 comprising an amino acid sequence of SEQ ID NO: 457; and a CDR3 comprising an amino acid sequence of SEQ ID NO: 458. In some embodiments, the single domain antibody provided herein comprises a CDR1 comprising an amino acid sequence of SEQ ID NO: 459; a CDR2 comprising an amino acid sequence of SEQ ID NO: 460; and a CDR3 comprising an amino acid sequence of SEQ ID NO: 461. In some embodiments, the single domain antibody provided herein comprises a CDR1 comprising an amino acid sequence of SEQ ID NO: 462; a CDR2 comprising an amino acid sequence of SEQ ID NO: 463; and a CDR3 comprising an amino acid sequence of SEQ ID NO: 464. In some embodiments, the single domain antibody provided herein comprises a CDR1 comprising an amino acid sequence of SEQ ID NO: 465; a CDR2 comprising an amino acid sequence of SEQ ID NO: 466; and a CDR3 comprising an amino acid sequence of SEQ ID NO: 467. In some embodiments, the single domain antibody provided herein comprises a CDR1 comprising an amino acid sequence of SEQ ID NO: 468; a CDR2 comprising an amino acid sequence of SEQ ID NO: 469; and a CDR3 comprising an amino acid sequence of SEQ ID NO: 470. In some embodiments, the single domain antibody provided herein comprises a CDR1 comprising an amino acid sequence of SEQ ID NO: 471; a CDR2 comprising an amino acid sequence of SEQ ID NO: 472; and a CDR3 comprising an amino acid sequence of SEQ ID NO: 473. In some embodiments, the single domain antibody provided herein comprises a CDR1 comprising an amino acid sequence of SEQ ID NO: 474; a CDR2 comprising an amino acid sequence of SEQ ID NO: 475; and a CDR3 comprising an amino acid sequence of SEQ ID NO: 476. In some embodiments, the single domain antibody provided herein comprises a CDR1 comprising an amino acid sequence of SEQ ID NO: 477; a CDR2 comprising an amino acid sequence of SEQ ID NO: 478; and a CDR3 comprising an amino acid sequence of SEQ ID NO: 479. In some embodiments, the single domain antibody provided herein comprises a CDR1 comprising an amino acid sequence of SEQ ID NO: 480; a CDR2 comprising an amino acid sequence of SEQ ID NO: 481; and a CDR3 comprising an amino acid sequence of SEQ ID NO: 482. In some embodiments, the single domain antibody provided herein comprises a CDR1 comprising an amino acid sequence of SEQ ID NO: 483; a CDR2 comprising an amino acid sequence of SEQ ID NO: 484; and a CDR3 comprising an amino acid sequence of SEQ ID NO: 485. In some embodiments, the single domain antibody provided herein comprises a CDR1 comprising an amino acid sequence of SEQ ID NO: 486; a CDR2 comprising an amino acid sequence of SEQ ID NO: 487; and a CDR3 comprising an amino acid sequence of SEQ ID NO: 488. In some embodiments, the single domain antibody provided herein comprises a CDR1 comprising an amino acid sequence of SEQ ID NO: 489; a CDR2 comprising an amino acid sequence of SEQ ID NO: 490; and a CDR3 comprising an amino acid sequence of SEQ ID NO: 491. In some embodiments, the single domain antibody provided herein comprises a CDR1 comprising an amino acid sequence of SEQ ID NO: 492; a CDR2 comprising an amino acid sequence of SEQ ID NO: 493; and a CDR3 comprising an amino acid sequence of SEQ ID NO: 494. In some embodiments, the single domain antibody provided herein comprises a CDR1 comprising an amino acid sequence of SEQ ID NO: 495; a CDR2 comprising an amino acid sequence of SEQ ID NO: 496; and a CDR3 comprising an amino acid sequence of SEQ ID NO: 497.

[0415] In some embodiments, the single domain antibody provided herein comprises a CDR1 comprising an amino acid sequence of SEQ ID NO: 498; a CDR2 comprising an amino acid sequence of SEQ ID NO: 499; and a CDR3 comprising an amino acid sequence of SEQ ID NO: 500. In some embodiments, the single domain antibody provided herein comprises a CDR1 comprising an amino acid sequence of SEQ ID NO: 501; a CDR2 comprising an amino acid sequence of SEQ ID NO: 502; and a CDR3 comprising an amino acid sequence of SEQ ID NO: 503. In some embodiments, the single domain antibody provided herein comprises a CDR1 comprising an amino acid sequence of SEQ ID NO: 504; a CDR2 comprising an amino acid sequence of SEQ ID NO: 505; and a CDR3 comprising an amino acid sequence of SEQ ID NO: 506. In some embodiments, the single domain antibody provided herein comprises a CDR1 comprising an amino acid sequence of SEQ ID NO: 507; a CDR2 comprising an amino acid sequence of SEQ ID NO: 508; and a CDR3 comprising an amino acid sequence of SEQ ID NO: 509. In some embodiments, the single domain antibody provided herein comprises a CDR1 comprising an amino acid sequence of SEQ ID NO: 510; a CDR2 comprising an amino acid sequence of SEQ ID NO: 511; and a CDR3 comprising an amino acid sequence of SEQ ID NO: 512. In some embodiments, the single domain antibody provided herein comprises a CDR1 comprising an amino acid sequence of SEQ ID NO: 513; a CDR2 comprising an amino acid sequence of SEQ ID NO: 514; and a CDR3 comprising an amino acid sequence of SEQ ID NO: 515. In some embodiments, the single domain antibody provided herein comprises a CDR1 comprising an amino acid sequence of SEQ ID NO: 516; a CDR2 comprising an amino acid sequence of SEQ ID NO: 517; and a CDR3 comprising an amino acid sequence of SEQ ID NO: 518. In some embodiments, the single domain antibody provided herein comprises a CDR1 comprising an amino acid sequence of SEQ ID NO: 519; a CDR2 comprising an amino acid sequence of SEQ ID NO: 520; and a CDR3 comprising an amino acid sequence of SEQ ID NO: 521. In some embodiments, the single domain antibody provided herein comprises a CDR1 comprising an amino acid sequence of SEQ ID NO: 522; a CDR2 comprising an amino acid sequence of SEQ ID NO: 523; and a CDR3 comprising an amino acid sequence of SEQ ID NO: 524. In some embodiments, the single domain antibody provided herein comprises a CDR1 comprising an amino acid sequence of SEQ ID NO: 525; a CDR2 comprising an amino acid sequence of SEQ ID NO: 526; and a CDR3 comprising an amino acid sequence of SEQ ID NO: 527. In some embodiments, the single domain antibody provided herein comprises a CDR1 comprising an amino acid sequence of SEQ ID NO: 528; a CDR2 comprising an amino acid sequence of SEQ ID NO: 529; and a CDR3 comprising an amino acid sequence of SEQ ID NO: 530. In some embodiments, the single domain antibody provided herein comprises a CDR1 comprising an amino acid sequence of SEQ ID NO: 531; a CDR2 comprising an amino acid sequence of SEQ ID NO: 532; and a CDR3 comprising an amino acid sequence of SEQ ID NO: 533. In some embodiments, the single domain antibody provided herein comprises a CDR1 comprising an amino acid sequence of SEQ ID NO: 534; a CDR2 comprising an amino acid sequence of SEQ ID NO: 535; and a CDR3 comprising an amino acid sequence of SEQ ID NO: 536. In some embodiments, the single domain antibody provided herein comprises a CDR1 comprising an amino acid sequence of SEQ ID NO: 537; a CDR2 comprising an amino acid sequence of SEQ ID NO: 538; and a CDR3 comprising an amino acid sequence of SEQ ID NO: 539. In some embodiments, the single domain antibody provided herein comprises a CDR1 comprising an amino acid sequence of SEQ ID NO: 540; a CDR2 comprising an amino acid sequence of SEQ ID NO: 541; and a CDR3 comprising an amino acid sequence of SEQ ID NO: 542. In some embodiments, the single domain antibody provided herein comprises a CDR1 comprising an amino acid sequence of SEQ ID NO: 543; a CDR2 comprising an amino acid sequence of SEQ ID NO: 544; and a CDR3 comprising an amino acid sequence of SEQ ID NO: 545. In some embodiments, the single domain antibody provided herein comprises a CDR1 comprising an amino acid sequence of SEQ ID NO: 546; a CDR2 comprising an amino acid sequence of SEQ ID NO: 547; and a CDR3 comprising an amino acid sequence of SEQ ID NO: 548. In some embodiments, the single domain antibody provided herein comprises a CDR1 comprising an amino acid sequence of SEQ ID NO: 549; a CDR2 comprising an amino acid sequence of SEQ ID NO: 550; and a CDR3 comprising an amino acid sequence of SEQ ID NO: 551. In some embodiments, the single domain antibody provided herein comprises a CDR1 comprising an amino acid sequence of SEQ ID NO: 552; a CDR2 comprising an amino acid sequence of SEQ ID NO: 553; and a CDR3 comprising an amino acid sequence of SEQ ID NO: 554. In some embodiments, the single domain antibody provided herein comprises a CDR1 comprising an amino acid sequence of SEQ ID NO: 555; a CDR2 comprising an amino acid sequence of SEQ ID NO: 556; and a CDR3 comprising an amino acid sequence of SEQ ID NO: 557. In some embodiments, the single domain antibody provided herein comprises a CDR1 comprising an amino acid sequence of SEQ ID NO: 558; a CDR2 comprising an amino acid sequence of SEQ ID NO: 559; and a CDR3 comprising an amino acid sequence of SEQ ID NO: 560. In some embodiments, the single domain antibody provided herein comprises a CDR1 comprising an amino acid sequence of SEQ ID NO: 561; a CDR2 comprising an amino acid sequence of SEQ ID NO: 562; and a CDR3 comprising an amino acid sequence of SEQ ID NO: 563. In some embodiments, the single domain antibody provided herein comprises a CDR1 comprising an amino acid sequence of SEQ ID NO: 564; a CDR2 comprising an amino acid sequence of SEQ ID NO: 565; and a CDR3 comprising an amino acid sequence of SEQ ID NO: 566. In some embodiments, the single domain antibody provided herein comprises a CDR1 comprising an amino acid sequence of SEQ ID NO: 567; a CDR2 comprising an amino acid sequence of SEQ ID NO: 568; and a CDR3 comprising an amino acid sequence of SEQ ID NO: 569. In some embodiments, the single domain antibody provided herein comprises a CDR1 comprising an amino acid sequence of SEQ ID NO: 570; a CDR2 comprising an amino acid sequence of SEQ ID NO: 571; and a CDR3 comprising an amino acid sequence of SEQ ID NO: 572. In some embodiments, the single domain antibody provided herein comprises a CDR1 comprising an amino acid sequence of SEQ ID NO: 573; a CDR2 comprising an amino acid sequence of SEQ ID NO: 574; and a CDR3 comprising an amino acid sequence of SEQ ID NO: 575. In some embodiments, the single domain antibody provided herein comprises a CDR1 comprising an amino acid sequence of SEQ ID NO: 576; a CDR2 comprising an amino acid sequence of SEQ ID NO: 577; and a CDR3 comprising an amino acid sequence of SEQ ID NO: 578. In some embodiments, the single domain antibody provided herein comprises a CDR1 comprising an amino acid sequence of SEQ ID NO: 579; a CDR2 comprising an amino acid sequence of SEQ ID NO: 580; and a CDR3 comprising an amino acid sequence of SEQ ID NO: 581. In some embodiments, the single domain antibody provided herein comprises a CDR1 comprising an amino acid sequence of SEQ ID NO: 582; a CDR2 comprising an amino acid sequence of SEQ ID NO: 583; and a CDR3 comprising an amino acid sequence of SEQ ID NO: 584. In some embodiments, the single domain antibody provided herein comprises a CDR1 comprising an amino acid sequence of SEQ ID NO: 585; a CDR2 comprising an amino acid sequence of SEQ ID NO: 586; and a CDR3 comprising an amino acid sequence of SEQ ID NO: 587. In some embodiments, the single domain antibody provided herein comprises a CDR1 comprising an amino acid sequence of SEQ ID NO: 588; a CDR2 comprising an amino acid sequence of SEQ ID NO: 589; and a CDR3 comprising an amino acid sequence of SEQ ID NO: 590. In some embodiments, the single domain antibody provided herein comprises a CDR1 comprising an amino acid sequence of SEQ ID NO: 591; a CDR2 comprising an amino acid sequence of SEQ ID NO: 592; and a CDR3 comprising an amino acid sequence of SEQ ID NO: 593. In some embodiments, the single domain antibody provided herein comprises a CDR1 comprising an amino acid sequence of SEQ ID NO: 594; a CDR2 comprising an amino acid sequence of SEQ ID NO: 595; and a CDR3 comprising an amino acid sequence of SEQ ID NO: 596. In some embodiments, the single domain antibody provided herein comprises a CDR1 comprising an amino acid sequence of SEQ ID NO: 597; a CDR2 comprising an amino acid sequence of SEQ ID NO: 598; and a CDR3 comprising an amino acid sequence of SEQ ID NO: 599. In some embodiments, the single domain antibody provided herein comprises a CDR1 comprising an amino acid sequence of SEQ ID NO: 600; a CDR2 comprising an amino acid sequence of SEQ ID NO: 601; and a CDR3 comprising an amino acid sequence of SEQ ID NO: 602. In some embodiments, the single domain antibody provided herein comprises a CDR1 comprising an amino acid sequence of SEQ ID NO: 603; a CDR2 comprising an amino acid sequence of SEQ ID NO: 604; and a CDR3 comprising an amino acid sequence of SEQ ID NO: 605. In some embodiments, the single domain antibody provided herein comprises a CDR1 comprising an amino acid sequence of SEQ ID NO: 606; a CDR2 comprising an amino acid sequence of SEQ ID NO: 607; and a CDR3 comprising an amino acid sequence of SEQ ID NO: 608. In some embodiments, the single domain antibody provided herein comprises a CDR1 comprising an amino acid sequence of SEQ ID NO: 609; a CDR2 comprising an amino acid sequence of SEQ ID NO: 610; and a CDR3 comprising an amino acid sequence of SEQ ID NO: 611. In some embodiments, the single domain antibody provided herein comprises a CDR1 comprising an amino acid sequence of SEQ ID NO: 612; a CDR2 comprising an amino acid sequence of SEQ ID NO: 613; and a CDR3 comprising an amino acid sequence of SEQ ID NO: 614. In some embodiments, the single domain antibody provided herein comprises a CDR1 comprising an amino acid sequence of SEQ ID NO: 615; a CDR2 comprising an amino acid sequence of SEQ ID NO: 616; and a CDR3 comprising an amino acid sequence of SEQ ID NO: 617. In some embodiments, the single domain antibody provided herein comprises a CDR1 comprising an amino acid sequence of SEQ ID NO: 618; a CDR2 comprising an amino acid sequence of SEQ ID NO: 619; and a CDR3 comprising an amino acid sequence of SEQ ID NO: 620. In some embodiments, the single domain antibody provided herein comprises a CDR1 comprising an amino acid sequence of SEQ ID NO: 621; a CDR2 comprising an amino acid sequence of SEQ ID NO: 622; and a CDR3 comprising an amino acid sequence of SEQ ID NO: 623. In some embodiments, the single domain antibody provided herein comprises a CDR1 comprising an amino acid sequence of SEQ ID NO: 624; a CDR2 comprising an amino acid sequence of SEQ ID NO: 625; and a CDR3 comprising an amino acid sequence of SEQ ID NO: 626. In some embodiments, the single domain antibody provided herein comprises a CDR1 comprising an amino acid sequence of SEQ ID NO: 627; a CDR2 comprising an amino acid sequence of SEQ ID NO: 628; and a CDR3 comprising an amino acid sequence of SEQ ID NO: 629. In some embodiments, the single domain antibody provided herein comprises a CDR1 comprising an amino acid sequence of SEQ ID NO: 630; a CDR2 comprising an amino acid sequence of SEQ ID NO: 631; and a CDR3 comprising an amino acid sequence of SEQ ID NO: 632. In some embodiments, the single domain antibody provided herein comprises a CDR1 comprising an amino acid sequence of SEQ ID NO: 633; a CDR2 comprising an amino acid sequence of SEQ ID NO: 634; and a CDR3 comprising an amino acid sequence of SEQ ID NO: 635. In some embodiments, the single domain antibody provided herein comprises a CDR1 comprising an amino acid sequence of SEQ ID NO: 636; a CDR2 comprising an amino acid sequence of SEQ ID NO: 637; and a CDR3 comprising an amino acid sequence of SEQ ID NO: 638. In some embodiments, the single domain antibody provided herein comprises a CDR1 comprising an amino acid sequence of SEQ ID NO: 639; a CDR2 comprising an amino acid sequence of SEQ ID NO: 640; and a CDR3 comprising an amino acid sequence of SEQ ID NO: 641. In some embodiments, the single domain antibody provided herein comprises a CDR1 comprising an amino acid sequence of SEQ ID NO: 642; a CDR2 comprising an amino acid sequence of SEQ ID NO: 643; and a CDR3 comprising an amino acid sequence of SEQ ID NO: 644. In some embodiments, the single domain antibody provided herein comprises a CDR1 comprising an amino acid sequence of SEQ ID NO: 645; a CDR2 comprising an amino acid sequence of SEQ ID NO: 646; and a CDR3 comprising an amino acid sequence of SEQ ID NO: 647. In some embodiments, the single domain antibody provided herein comprises a CDR1 comprising an amino acid sequence of SEQ ID NO: 648; a CDR2 comprising an amino acid sequence of SEQ ID NO: 649; and a CDR3 comprising an amino acid sequence of SEQ ID NO: 650. In some embodiments, the single domain antibody provided herein comprises a CDR1 comprising an amino acid sequence of SEQ ID NO: 651; a CDR2 comprising an amino acid sequence of SEQ ID NO: 652; and a CDR3 comprising an amino acid sequence of SEQ ID NO: 653. In some embodiments, the single domain antibody provided herein comprises a CDR1 comprising an amino acid sequence of SEQ ID NO: 654; a CDR2 comprising an amino acid sequence of SEQ ID NO: 655; and a CDR3 comprising an amino acid sequence of SEQ ID NO: 656. In some embodiments, the single domain antibody provided herein comprises a CDR1 comprising an amino acid sequence of SEQ ID NO: 657; a CDR2 comprising an amino acid sequence of SEQ ID NO: 658; and a CDR3 comprising an amino acid sequence of SEQ ID NO: 659. In some embodiments, the single domain antibody provided herein comprises a CDR1 comprising an amino acid sequence of SEQ ID NO: 660; a CDR2 comprising an amino acid sequence of SEQ ID NO: 661; and a CDR3 comprising an amino acid sequence of SEQ ID NO: 662. In some embodiments, the single domain antibody provided herein comprises a CDR1 comprising an amino acid sequence of SEQ ID NO: 663; a CDR2 comprising an amino acid sequence of SEQ ID NO: 664; and a CDR3 comprising an amino acid sequence of SEQ ID NO: 665. In some embodiments, the single domain antibody provided herein comprises a CDR1 comprising an amino acid sequence of SEQ ID NO: 666; a CDR2 comprising an amino acid sequence of SEQ ID NO: 667; and a CDR3 comprising an amino acid sequence of SEQ ID NO: 668. In some embodiments, the single domain antibody provided herein comprises a CDR1 comprising an amino acid sequence of SEQ ID NO: 669; a CDR2 comprising an amino acid sequence of SEQ ID NO: 670; and a CDR3 comprising an amino acid sequence of SEQ ID NO: 671. In some embodiments, the single domain antibody provided herein comprises a CDR1 comprising an amino acid sequence of SEQ ID NO: 672; a CDR2 comprising an amino acid sequence of SEQ ID NO: 673; and a CDR3 comprising an amino acid sequence of SEQ ID NO: 674. In some embodiments, the single domain antibody provided herein comprises a CDR1 comprising an amino acid sequence of SEQ ID NO: 675; a CDR2 comprising an amino acid sequence of SEQ ID NO: 676; and a CDR3 comprising an amino acid sequence of SEQ ID NO: 677. In some embodiments, the single domain antibody provided herein comprises a CDR1 comprising an amino acid sequence of SEQ ID NO: 678; a CDR2 comprising an amino acid sequence of SEQ ID NO: 679; and a CDR3 comprising an amino acid sequence of SEQ ID NO: 680. In some embodiments, the single domain antibody provided herein comprises a CDR1 comprising an amino acid sequence of SEQ ID NO: 681; a CDR2 comprising an amino acid sequence of SEQ ID NO: 682; and a CDR3 comprising an amino acid sequence of SEQ ID NO: 683. In some embodiments, the single domain antibody provided herein comprises a CDR1 comprising an amino acid sequence of SEQ ID NO: 684; a CDR2 comprising an amino acid sequence of SEQ ID NO: 685; and a CDR3 comprising an amino acid sequence of SEQ ID NO: 686. In some embodiments, the single domain antibody provided herein comprises a CDR1 comprising an amino acid sequence of SEQ ID NO: 687; a CDR2 comprising an amino acid sequence of SEQ ID NO: 688; and a CDR3 comprising an amino acid sequence of SEQ ID NO: 689. In some embodiments, the single domain antibody provided herein comprises a CDR1 comprising an amino acid sequence of SEQ ID NO: 690; a CDR2 comprising an amino acid sequence of SEQ ID NO: 691; and a CDR3 comprising an amino acid sequence of SEQ ID NO: 692. In some embodiments, the single domain antibody provided herein comprises a CDR1 comprising an amino acid sequence of SEQ ID NO: 693; a CDR2 comprising an amino acid sequence of SEQ ID NO: 694; and a CDR3 comprising an amino acid sequence of SEQ ID NO: 695. In some embodiments, the single domain antibody provided herein comprises a CDR1 comprising an amino acid sequence of SEQ ID NO: 696; a CDR2 comprising an amino acid sequence of SEQ ID NO: 697; and a CDR3 comprising an amino acid sequence of SEQ ID NO: 698. In some embodiments, the single domain antibody provided herein comprises a CDR1 comprising an amino acid sequence of SEQ ID NO: 699; a CDR2 comprising an amino acid sequence of SEQ ID NO: 700; and a CDR3 comprising an amino acid sequence of SEQ ID NO: 701. In some embodiments, the single domain antibody provided herein comprises a CDR1 comprising an amino acid sequence of SEQ ID NO: 702; a CDR2 comprising an amino acid sequence of SEQ ID NO: 703; and a CDR3 comprising an amino acid sequence of SEQ ID NO: 704. In some embodiments, the single domain antibody provided herein comprises a CDR1 comprising an amino acid sequence of SEQ ID NO: 705; a CDR2 comprising an amino acid sequence of SEQ ID NO: 706; and a CDR3 comprising an amino acid sequence of SEQ ID NO: 707. In some embodiments, the single domain antibody provided herein comprises a CDR1 comprising an amino acid sequence of SEQ ID NO: 708; a CDR2 comprising an amino acid sequence of SEQ ID NO: 709; and a CDR3 comprising an amino acid sequence of SEQ ID NO: 710. In some embodiments, the single domain antibody provided herein comprises a CDR1 comprising an amino acid sequence of SEQ ID NO: 711; a CDR2 comprising an amino acid sequence of SEQ ID NO: 712; and a CDR3 comprising an amino acid sequence of SEQ ID NO: 713. In some embodiments, the single domain antibody provided herein comprises a CDR1 comprising an amino acid sequence of SEQ ID NO: 714; a CDR2 comprising an amino acid sequence of SEQ ID NO: 715; and a CDR3 comprising an amino acid sequence of SEQ ID NO: 716. In some embodiments, the single domain antibody provided herein comprises a CDR1 comprising an amino acid sequence of SEQ ID NO: 717; a CDR2 comprising an amino acid sequence of SEQ ID NO: 718; and a CDR3 comprising an amino acid sequence of SEQ ID NO: 719. In some embodiments, the single domain antibody provided herein comprises a CDR1 comprising an amino acid sequence of SEQ ID NO: 720; a CDR2 comprising an amino acid sequence of SEQ ID NO: 721; and a CDR3 comprising an amino acid sequence of SEQ ID NO: 722. In some embodiments, the single domain antibody provided herein comprises a CDR1 comprising an amino acid sequence of SEQ ID NO: 723; a CDR2 comprising an amino acid sequence of SEQ ID NO: 724; and a CDR3 comprising an amino acid sequence of SEQ ID NO: 725. In some embodiments, the single domain antibody provided herein comprises a CDR1 comprising an amino acid sequence of SEQ ID NO: 726; a CDR2 comprising an amino acid sequence of SEQ ID NO: 727; and a CDR3 comprising an amino acid sequence of SEQ ID NO: 728. In some embodiments, the single domain antibody provided herein comprises a CDR1 comprising an amino acid sequence of SEQ ID NO: 729; a CDR2 comprising an amino acid sequence of SEQ ID NO: 730; and a CDR3 comprising an amino acid sequence of SEQ ID NO: 731. In some embodiments, the single domain antibody provided herein comprises a CDR1 comprising an amino acid sequence of SEQ ID NO: 732; a CDR2 comprising an amino acid sequence of SEQ ID NO: 733; and a CDR3 comprising an amino acid sequence of SEQ ID NO: 734. In some embodiments, the single domain antibody provided herein comprises a CDR1 comprising an amino acid sequence of SEQ ID NO: 735; a CDR2 comprising an amino acid sequence of SEQ ID NO: 736; and a CDR3 comprising an amino acid sequence of SEQ ID NO: 737. In some embodiments, the single domain antibody provided herein comprises a CDR1 comprising an amino acid sequence of SEQ ID NO: 738; a CDR2 comprising an amino acid sequence of SEQ ID NO: 739; and a CDR3 comprising an amino acid sequence of SEQ ID NO: 740. In some embodiments, the single domain antibody provided herein comprises a CDR1 comprising an amino acid sequence of SEQ ID NO: 741; a CDR2 comprising an amino acid sequence of SEQ ID NO: 742; and a CDR3 comprising an amino acid sequence of SEQ ID NO: 743. In some embodiments, the single domain antibody provided herein comprises a CDR1 comprising an amino acid sequence of SEQ ID NO: 744; a CDR2 comprising an amino acid sequence of SEQ ID NO: 745; and a CDR3 comprising an amino acid sequence of SEQ ID NO: 746. In some embodiments, the single domain antibody provided herein comprises a CDR1 comprising an amino acid sequence of SEQ ID NO: 747; a CDR2 comprising an amino acid sequence of SEQ ID NO: 748; and a CDR3 comprising an amino acid sequence of SEQ ID NO: 749. In some embodiments, the single domain antibody provided herein comprises a CDR1 comprising an amino acid sequence of SEQ ID NO: 750; a CDR2 comprising an amino acid sequence of SEQ ID NO: 751; and a CDR3 comprising an amino acid sequence of SEQ ID NO: 752. In some embodiments, the single domain antibody provided herein comprises a CDR1 comprising an amino acid sequence of SEQ ID NO: 753; a CDR2 comprising an amino acid sequence of SEQ ID NO: 754; and a CDR3 comprising an amino acid sequence of SEQ ID NO: 755. In some embodiments, the single domain antibody provided herein comprises a CDR1 comprising an amino acid sequence of SEQ ID NO: 756; a CDR2 comprising an amino acid sequence of SEQ ID NO: 757; and a CDR3 comprising an amino acid sequence of SEQ ID NO: 758. In some embodiments, the single domain antibody provided herein comprises a CDR1 comprising an amino acid sequence of SEQ ID NO: 759; a CDR2 comprising an amino acid sequence of SEQ ID NO: 760; and a CDR3 comprising an amino acid sequence of SEQ ID NO: 761. In some embodiments, the single domain antibody provided herein comprises a CDR1 comprising an amino acid sequence of SEQ ID NO: 762; a CDR2 comprising an amino acid sequence of SEQ ID NO: 763; and a CDR3 comprising an amino acid sequence of SEQ ID NO: 764. In some embodiments, the single domain antibody provided herein comprises a CDR1 comprising an amino acid sequence of SEQ ID NO: 765; a CDR2 comprising an amino acid sequence of SEQ ID NO: 766; and a CDR3 comprising an amino acid sequence of SEQ ID NO: 767. In some embodiments, the single domain antibody provided herein comprises a CDR1 comprising an amino acid sequence of SEQ ID NO: 768; a CDR2 comprising an amino acid sequence of SEQ ID NO: 769; and a CDR3 comprising an amino acid sequence of SEQ ID NO: 770. In some embodiments, the single domain antibody provided herein comprises a CDR1 comprising an amino acid sequence of SEQ ID NO: 771; a CDR2 comprising an amino acid sequence of SEQ ID NO: 772; and a CDR3 comprising an amino acid sequence of SEQ ID NO: 773. In some embodiments, the single domain antibody provided herein comprises a CDR1 comprising an amino acid sequence of SEQ ID NO: 774; a CDR2 comprising an amino acid sequence of SEQ ID NO: 775; and a CDR3 comprising an amino acid sequence of SEQ ID NO: 776. In some embodiments, the single domain antibody provided herein comprises a CDR1 comprising an amino acid sequence of SEQ ID NO: 777; a CDR2 comprising an amino acid sequence of SEQ ID NO: 778; and a CDR3 comprising an amino acid sequence of SEQ ID NO: 779. In some embodiments, the single domain antibody provided herein comprises a CDR1 comprising an amino acid sequence of SEQ ID NO: 780; a CDR2 comprising an amino acid sequence of SEQ ID NO: 781; and a CDR3 comprising an amino acid sequence of SEQ ID NO: 782. In some embodiments, the single domain antibody provided herein comprises a CDR1 comprising an amino acid sequence of SEQ ID NO: 783; a CDR2 comprising an amino acid sequence of SEQ ID NO: 784; and a CDR3 comprising an amino acid sequence of SEQ ID NO: 785. In some embodiments, the single domain antibody provided herein comprises a CDR1 comprising an amino acid sequence of SEQ ID NO: 786; a CDR2 comprising an amino acid sequence of SEQ ID NO: 787; and a CDR3 comprising an amino acid sequence of SEQ ID NO: 788. In some embodiments, the single domain antibody provided herein comprises a CDR1 comprising an amino acid sequence of SEQ ID NO: 789; a CDR2 comprising an amino acid sequence of SEQ ID NO: 790; and a CDR3 comprising an amino acid sequence of SEQ ID NO: 791. In some embodiments, the single domain antibody provided herein comprises a CDR1 comprising an amino acid sequence of SEQ ID NO: 792; a CDR2 comprising an amino acid sequence of SEQ ID NO: 793; and a CDR3 comprising an amino acid sequence of SEQ ID NO: 794. In some embodiments, the single domain antibody provided herein comprises a CDR1 comprising an amino acid sequence of SEQ ID NO: 795; a CDR2 comprising an amino acid sequence of SEQ ID NO: 796; and a CDR3 comprising an amino acid sequence of SEQ ID NO: 797. In some embodiments, the single domain antibody provided herein comprises a CDR1 comprising an amino acid sequence of SEQ ID NO: 798; a CDR2 comprising an amino acid sequence of SEQ ID NO: 799; and a CDR3 comprising an amino acid sequence of SEQ ID NO: 800. In some embodiments, the single domain antibody provided herein comprises a CDR1 comprising an amino acid sequence of SEQ ID NO: 801; a CDR2 comprising an amino acid sequence of SEQ ID NO: 802; and a CDR3 comprising an amino acid sequence of SEQ ID NO: 803. In some embodiments, the single domain antibody provided herein comprises a CDR1 comprising an amino acid sequence of SEQ ID NO: 804; a CDR2 comprising an amino acid sequence of SEQ ID NO: 805; and a CDR3 comprising an amino acid sequence of SEQ ID NO: 806. In some embodiments, the single domain antibody provided herein comprises a CDR1 comprising an amino acid sequence of SEQ ID NO: 807; a CDR2 comprising an amino acid sequence of SEQ ID NO: 808; and a CDR3 comprising an amino acid sequence of SEQ ID NO: 809. In some embodiments, the single domain antibody provided herein comprises a CDR1 comprising an amino acid sequence of SEQ ID NO: 810; a CDR2 comprising an amino acid sequence of SEQ ID NO: 811; and a CDR3 comprising an amino acid sequence of SEQ ID NO: 812. In some embodiments, the single domain antibody provided herein comprises a CDR1 comprising an amino acid sequence of SEQ ID NO: 813; a CDR2 comprising an amino acid sequence of SEQ ID NO: 814; and a CDR3 comprising an amino acid sequence of SEQ ID NO: 815. In some embodiments, the single domain antibody provided herein comprises a CDR1 comprising an amino acid sequence of SEQ ID NO: 816; a CDR2 comprising an amino acid sequence of SEQ ID NO: 817; and a CDR3 comprising an amino acid sequence of SEQ ID NO: 818. In some embodiments, the single domain antibody provided herein comprises a CDR1 comprising an amino acid sequence of SEQ ID NO: 819; a CDR2 comprising an amino acid sequence of SEQ ID NO: 820; and a CDR3 comprising an amino acid sequence of SEQ ID NO: 821. In some embodiments, the single domain antibody provided herein comprises a CDR1 comprising an amino acid sequence of SEQ ID NO: 822; a CDR2 comprising an amino acid sequence of SEQ ID NO: 823; and a CDR3 comprising an amino acid sequence of SEQ ID NO: 824. In some embodiments, the single domain antibody provided herein comprises a CDR1 comprising an amino acid sequence of SEQ ID NO: 825; a CDR2 comprising an amino acid sequence of SEQ ID NO: 826; and a CDR3 comprising an amino acid sequence of SEQ ID NO: 827. In some embodiments, the single domain antibody provided herein comprises a CDR1 comprising an amino acid sequence of SEQ ID NO: 828; a CDR2 comprising an amino acid sequence of SEQ ID NO: 829; and a CDR3 comprising an amino acid sequence of SEQ ID NO: 830. In some embodiments, the single domain antibody provided herein comprises a CDR1 comprising an amino acid sequence of SEQ ID NO: 831; a CDR2 comprising an amino acid sequence of SEQ ID NO: 832; and a CDR3 comprising an amino acid sequence of SEQ ID NO: 833. In some embodiments, the single domain antibody provided herein comprises a CDR1 comprising an amino acid sequence of SEQ ID NO: 834; a CDR2 comprising an amino acid sequence of SEQ ID NO: 835; and a CDR3 comprising an amino acid sequence of SEQ ID NO: 836. In some embodiments, the single domain antibody provided herein comprises a CDR1 comprising an amino acid sequence of SEQ ID NO: 837; a CDR2 comprising an amino acid sequence of SEQ ID NO: 838; and a CDR3 comprising an amino acid sequence of SEQ ID NO: 839. In some embodiments, the single domain antibody provided herein comprises a CDR1 comprising an amino acid sequence of SEQ ID NO: 840; a CDR2 comprising an amino acid sequence of SEQ ID NO: 841; and a CDR3 comprising an amino acid sequence of SEQ ID NO: 842. In some embodiments, the single domain antibody provided herein comprises a CDR1 comprising an amino acid sequence of SEQ ID NO: 843; a CDR2 comprising an amino acid sequence of SEQ ID NO: 844; and a CDR3 comprising an amino acid sequence of SEQ ID NO: 845. In some embodiments, the single domain antibody provided herein comprises a CDR1 comprising an amino acid sequence of SEQ ID NO: 846; a CDR2 comprising an amino acid sequence of SEQ ID NO: 847; and a CDR3 comprising an amino acid sequence of SEQ ID NO: 848. In some embodiments, the single domain antibody provided herein comprises a CDR1 comprising an amino acid sequence of SEQ ID NO: 849; a CDR2 comprising an amino acid sequence of SEQ ID NO: 850; and a CDR3 comprising an amino acid sequence of SEQ ID NO: 851. In some embodiments, the single domain antibody provided herein comprises a CDR1 comprising an amino acid sequence of SEQ ID NO: 852; a CDR2 comprising an amino acid sequence of SEQ ID NO: 853; and a CDR3 comprising an amino acid sequence of SEQ ID NO: 854. In some embodiments, the single domain antibody provided herein comprises a CDR1 comprising an amino acid sequence of SEQ ID NO: 855; a CDR2 comprising an amino acid sequence of SEQ ID NO: 856; and a CDR3 comprising an amino acid sequence of SEQ ID NO: 857. In some embodiments, the single domain antibody provided herein comprises a CDR1 comprising an amino acid sequence of SEQ ID NO: 858; a CDR2 comprising an amino acid sequence of SEQ ID NO: 859; and a CDR3 comprising an amino acid sequence of SEQ ID NO: 860. In some embodiments, the single domain antibody provided herein comprises a CDR1 comprising an amino acid sequence of SEQ ID NO: 861; a CDR2 comprising an amino acid sequence of SEQ ID NO: 862; and a CDR3 comprising an amino acid sequence of SEQ ID NO: 863. In some embodiments, the single domain antibody provided herein comprises a CDR1 comprising an amino acid sequence of SEQ ID NO: 864; a CDR2 comprising an amino acid sequence of SEQ ID NO: 865; and a CDR3 comprising an amino acid sequence of SEQ ID NO: 866. In some embodiments, the single domain antibody provided herein comprises a CDR1 comprising an amino acid sequence of SEQ ID NO: 867; a CDR2 comprising an amino acid sequence of SEQ ID NO: 868; and a CDR3 comprising an amino acid sequence of SEQ ID NO: 869. In some embodiments, the single domain antibody provided herein comprises a CDR1 comprising an amino acid sequence of SEQ ID NO: 870; a CDR2 comprising an amino acid sequence of SEQ ID NO: 871; and a CDR3 comprising an amino acid sequence of SEQ ID NO: 872. In some embodiments, the single domain antibody provided herein comprises a CDR1 comprising an amino acid sequence of SEQ ID NO: 873; a CDR2 comprising an amino acid sequence of SEQ ID NO: 874; and a CDR3 comprising an amino acid sequence of SEQ ID NO: 875. In some embodiments, the single domain antibody provided herein comprises a CDR1 comprising an amino acid sequence of SEQ ID NO: 876; a CDR2 comprising an amino acid sequence of SEQ ID NO: 877; and a CDR3 comprising an amino acid sequence of SEQ ID NO: 878. In some embodiments, the single domain antibody provided herein comprises a CDR1 comprising an amino acid sequence of SEQ ID NO: 879; a CDR2 comprising an amino acid sequence of SEQ ID NO: 880; and a CDR3 comprising an amino acid sequence of SEQ ID NO: 881. In some embodiments, the single domain antibody provided herein comprises a CDR1 comprising an amino acid sequence of SEQ ID NO: 882; a CDR2 comprising an amino acid sequence of SEQ ID NO: 883; and a CDR3 comprising an amino acid sequence of SEQ ID NO: 884. In some embodiments, the single domain antibody provided herein comprises a CDR1 comprising an amino acid sequence of SEQ ID NO: 885; a CDR2 comprising an amino acid sequence of SEQ ID NO: 886; and a CDR3 comprising an amino acid sequence of SEQ ID NO: 887. In some embodiments, the single domain antibody provided herein comprises a CDR1 comprising an amino acid sequence of SEQ ID NO: 888; a CDR2 comprising an amino acid sequence of SEQ ID NO: 889; and a CDR3 comprising an amino acid sequence of SEQ ID NO: 890. In some embodiments, the single domain antibody provided herein comprises a CDR1 comprising an amino acid sequence of SEQ ID NO: 891; a CDR2 comprising an amino acid sequence of SEQ ID NO: 892; and a CDR3 comprising an amino acid sequence of SEQ ID NO: 893. In some embodiments, the single domain antibody provided herein comprises a CDR1 comprising an amino acid sequence of SEQ ID NO: 894; a CDR2 comprising an amino acid sequence of SEQ ID NO: 895; and a CDR3 comprising an amino acid sequence of SEQ ID NO: 896. In some embodiments, the single domain antibody provided herein comprises a CDR1 comprising an amino acid sequence of SEQ ID NO: 897; a CDR2 comprising an amino acid sequence of SEQ ID NO: 898; and a CDR3 comprising an amino acid sequence of SEQ ID NO: 899. In some embodiments, the single domain antibody provided herein comprises a CDR1 comprising an amino acid sequence of SEQ ID NO: 900; a CDR2 comprising an amino acid sequence of SEQ ID NO: 901; and a CDR3 comprising an amino acid sequence of SEQ ID NO: 902. In some embodiments, the single domain antibody provided herein comprises a CDR1 comprising an amino acid sequence of SEQ ID NO: 903; a CDR2 comprising an amino acid sequence of SEQ ID NO: 904; and a CDR3 comprising an amino acid sequence of SEQ ID NO: 905. In some embodiments, the single domain antibody provided herein comprises a CDR1 comprising an amino acid sequence of SEQ ID NO: 906; a CDR2 comprising an amino acid sequence of SEQ ID NO: 907; and a CDR3 comprising an amino acid sequence of SEQ ID NO: 908. In some embodiments, the single domain antibody provided herein comprises a CDR1 comprising an amino acid sequence of SEQ ID NO: 909; a CDR2 comprising an amino acid sequence of SEQ ID NO: 910; and a CDR3 comprising an amino acid sequence of SEQ ID NO: 911. In some embodiments, the single domain antibody provided herein comprises a CDR1 comprising an amino acid sequence of SEQ ID NO: 912; a CDR2 comprising an amino acid sequence of SEQ ID NO: 913; and a CDR3 comprising an amino acid sequence of SEQ ID NO: 914. In some embodiments, the single domain antibody provided herein comprises a CDR1 comprising an amino acid sequence of SEQ ID NO: 915; a CDR2 comprising an amino acid sequence of SEQ ID NO: 916; and a CDR3 comprising an amino acid sequence of SEQ ID NO: 917. In some embodiments, the single domain antibody provided herein comprises a CDR1 comprising an amino acid sequence of SEQ ID NO: 918; a CDR2 comprising an amino acid sequence of SEQ ID NO: 919; and a CDR3 comprising an amino acid sequence of SEQ ID NO: 920. In some embodiments, the single domain antibody provided herein comprises a CDR1 comprising an amino acid sequence of SEQ ID NO: 921; a CDR2 comprising an amino acid sequence of SEQ ID NO: 922; and a CDR3 comprising an amino acid sequence of SEQ ID NO: 923. In some embodiments, the single domain antibody provided herein comprises a CDR1 comprising an amino acid sequence of SEQ ID NO: 924; a CDR2 comprising an amino acid sequence of SEQ ID NO: 925; and a CDR3 comprising an amino acid sequence of SEQ ID NO: 926. In some embodiments, the single domain antibody provided herein comprises a CDR1 comprising an amino acid sequence of SEQ ID NO: 927; a CDR2 comprising an amino acid sequence of SEQ ID NO: 928; and a CDR3 comprising an amino acid sequence of SEQ ID NO: 929. In some embodiments, the single domain antibody provided herein comprises a CDR1 comprising an amino acid sequence of SEQ ID NO: 930; a CDR2 comprising an amino acid sequence of SEQ ID NO: 931; and a CDR3 comprising an amino acid sequence of SEQ ID NO: 932. In some embodiments, the single domain antibody provided herein comprises a CDR1 comprising an amino acid sequence of SEQ ID NO: 933; a CDR2 comprising an amino acid sequence of SEQ ID NO: 934; and a CDR3 comprising an amino acid sequence of SEQ ID NO: 935. In some embodiments, the single domain antibody provided herein comprises a CDR1 comprising an amino acid sequence of SEQ ID NO: 936; a CDR2 comprising an amino acid sequence of SEQ ID NO: 937; and a CDR3 comprising an amino acid sequence of SEQ ID NO: 938. In some embodiments, the single domain antibody provided herein comprises a CDR1 comprising an amino acid sequence of SEQ ID NO: 939; a CDR2 comprising an amino acid sequence of SEQ ID NO: 940; and a CDR3 comprising an amino acid sequence of SEQ ID NO: 941. In some embodiments, the single domain antibody provided herein comprises a CDR1 comprising an amino acid sequence of SEQ ID NO: 942; a CDR2 comprising an amino acid sequence of SEQ ID NO: 943; and a CDR3 comprising an amino acid sequence of SEQ ID NO: 944. In some embodiments, the single domain antibody provided herein comprises a CDR1 comprising an amino acid sequence of SEQ ID NO: 945; a CDR2 comprising an amino acid sequence of SEQ ID NO: 946; and a CDR3 comprising an amino acid sequence of SEQ ID NO: 947. In some embodiments, the single domain antibody provided herein comprises a CDR1 comprising an amino acid sequence of SEQ ID NO: 948; a CDR2 comprising an amino acid sequence of SEQ ID NO: 949; and a CDR3 comprising an amino acid sequence of SEQ ID NO: 950. In some embodiments, the single domain antibody provided herein comprises a CDR1 comprising an amino acid sequence of SEQ ID NO: 951; a CDR2 comprising an amino acid sequence of SEQ ID NO: 952; and a CDR3 comprising an amino acid sequence of SEQ ID NO: 953. In some embodiments, the single domain antibody provided herein comprises a CDR1 comprising an amino acid sequence of SEQ ID NO: 954; a CDR2 comprising an amino acid sequence of SEQ ID NO: 955; and a CDR3 comprising an amino acid sequence of SEQ ID NO: 956. In some embodiments, the single domain antibody provided herein comprises a CDR1 comprising an amino acid sequence of SEQ ID NO: 957; a CDR2 comprising an amino acid sequence of SEQ ID NO: 958; and a CDR3 comprising an amino acid sequence of SEQ ID NO: 959. In some embodiments, the single domain antibody provided herein comprises a CDR1 comprising an amino acid sequence of SEQ ID NO: 960; a CDR2 comprising an amino acid sequence of SEQ ID NO: 961; and a CDR3 comprising an amino acid sequence of SEQ ID NO: 962. In some embodiments, the single domain antibody provided herein comprises a CDR1 comprising an amino acid sequence of SEQ ID NO: 963; a CDR2 comprising an amino acid sequence of SEQ ID NO: 964; and a CDR3 comprising an amino acid sequence of SEQ ID NO: 965. In some embodiments, the single domain antibody provided herein comprises a CDR1 comprising an amino acid sequence of SEQ ID NO: 966; a CDR2 comprising an amino acid sequence of SEQ ID NO: 967; and a CDR3 comprising an amino acid sequence of SEQ ID NO: 968. In some embodiments, the single domain antibody provided herein comprises a CDR1 comprising an amino acid sequence of SEQ ID NO: 969; a CDR2 comprising an amino acid sequence of SEQ ID NO: 970; and a CDR3 comprising an amino acid sequence of SEQ ID NO: 971. In some embodiments, the single domain antibody provided herein comprises a CDR1 comprising an amino acid sequence of SEQ ID NO: 972; a CDR2 comprising an amino acid sequence of SEQ ID NO: 973; and a CDR3 comprising an amino acid sequence of SEQ ID NO: 974. In some embodiments, the single domain antibody provided herein comprises a CDR1 comprising an amino acid sequence of SEQ ID NO: 975; a CDR2 comprising an amino acid sequence of SEQ ID NO: 976; and a CDR3 comprising an amino acid sequence of SEQ ID NO: 977. In some embodiments, the single domain antibody provided herein comprises a CDR1 comprising an amino acid sequence of SEQ ID NO: 978; a CDR2 comprising an amino acid sequence of SEQ ID NO: 979; and a CDR3 comprising an amino acid sequence of SEQ ID NO: 980. In some embodiments, the single domain antibody provided herein comprises a CDR1 comprising an amino acid sequence of SEQ ID NO: 981; a CDR2 comprising an amino acid sequence of SEQ ID NO: 982; and a CDR3 comprising an amino acid sequence of SEQ ID NO: 983. In some embodiments, the single domain antibody provided herein comprises a CDR1 comprising an amino acid sequence of SEQ ID NO: 984; a CDR2 comprising an amino acid sequence of SEQ ID NO: 985; and a CDR3 comprising an amino acid sequence of SEQ ID NO: 986. In some embodiments, the single domain antibody provided herein comprises a CDR1 comprising an amino acid sequence of SEQ ID NO: 987; a CDR2 comprising an amino acid sequence of SEQ ID NO: 988; and a CDR3 comprising an amino acid sequence of SEQ ID NO: 989. In some embodiments, the single domain antibody provided herein comprises a CDR1 comprising an amino acid sequence of SEQ ID NO: 990; a CDR2 comprising an amino acid sequence of SEQ ID NO: 991; and a CDR3 comprising an amino acid sequence of SEQ ID NO: 992. In some embodiments, the single domain antibody provided herein comprises a CDR1 comprising an amino acid sequence of SEQ ID NO: 993; a CDR2 comprising an amino acid sequence of SEQ ID NO: 994; and a CDR3 comprising an amino acid sequence of SEQ ID NO: 995. In some embodiments, the single domain antibody provided herein comprises a CDR1 comprising an amino acid sequence of SEQ ID NO: 996; a CDR2 comprising an amino acid sequence of SEQ ID NO: 997; and a CDR3 comprising an amino acid sequence of SEQ ID NO: 998.

[0416] In some embodiments, the single domain antibody provided herein comprises a CDR1 comprising an amino acid sequence of SEQ ID NO: 999; a CDR2 comprising an amino acid sequence of SEQ ID NO: 1000; and a CDR3 comprising an amino acid sequence of SEQ ID NO: 1001. In some embodiments, the single domain antibody provided herein comprises a CDR1 comprising an amino acid sequence of SEQ ID NO: 1002; a CDR2 comprising an amino acid sequence of SEQ ID NO: 1003; and a CDR3 comprising an amino acid sequence of SEQ ID NO: 1004. In some embodiments, the single domain antibody provided herein comprises a CDR1 comprising an amino acid sequence of SEQ ID NO: 1005; a CDR2 comprising an amino acid sequence of SEQ ID NO: 1006; and a CDR3 comprising an amino acid sequence of SEQ ID NO: 1007. In some embodiments, the single domain antibody provided herein comprises a CDR1 comprising an amino acid sequence of SEQ ID NO: 1008; a CDR2 comprising an amino acid sequence of SEQ ID NO: 1009; and a CDR3 comprising an amino acid sequence of SEQ ID NO: 1010. In some embodiments, the single domain antibody provided herein comprises a CDR1 comprising an amino acid sequence of SEQ ID NO: 1011; a CDR2 comprising an amino acid sequence of SEQ ID NO: 1012; and a CDR3 comprising an amino acid sequence of SEQ ID NO: 1013. In some embodiments, the single domain antibody provided herein comprises a CDR1 comprising an amino acid sequence of SEQ ID NO: 1014; a CDR2 comprising an amino acid sequence of SEQ ID NO: 1015; and a CDR3 comprising an amino acid sequence of SEQ ID NO: 1016. In some embodiments, the single domain antibody provided herein comprises a CDR1 comprising an amino acid sequence of SEQ ID NO: 1017; a CDR2 comprising an amino acid sequence of SEQ ID NO: 1018; and a CDR3 comprising an amino acid sequence of SEQ ID NO: 1019. In some embodiments, the single domain antibody provided herein comprises a CDR1 comprising an amino acid sequence of SEQ ID NO: 1020; a CDR2 comprising an amino acid sequence of SEQ ID NO: 1021; and a CDR3 comprising an amino acid sequence of SEQ ID NO: 1022. In some embodiments, the single domain antibody provided herein comprises a CDR1 comprising an amino acid sequence of SEQ ID NO: 1023; a CDR2 comprising an amino acid sequence of SEQ ID NO: 1024; and a CDR3 comprising an amino acid sequence of SEQ ID NO: 1025. In some embodiments, the single domain antibody provided herein comprises a CDR1 comprising an amino acid sequence of SEQ ID NO: 1026; a CDR2 comprising an amino acid sequence of SEQ ID NO: 1027; and a CDR3 comprising an amino acid sequence of SEQ ID NO: 1028. In some embodiments, the single domain antibody provided herein comprises a CDR1 comprising an amino acid sequence of SEQ ID NO: 1029; a CDR2 comprising an amino acid sequence of SEQ ID NO: 1030; and a CDR3 comprising an amino acid sequence of SEQ ID NO: 1031. In some embodiments, the single domain antibody provided herein comprises a CDR1 comprising an amino acid sequence of SEQ ID NO: 1032; a CDR2 comprising an amino acid sequence of SEQ ID NO: 1033; and a CDR3 comprising an amino acid sequence of SEQ ID NO: 1034. In some embodiments, the single domain antibody provided herein comprises a CDR1 comprising an amino acid sequence of SEQ ID NO: 1035; a CDR2 comprising an amino acid sequence of SEQ ID NO: 1036; and a CDR3 comprising an amino acid sequence of SEQ ID NO: 1037. In some embodiments, the single domain antibody provided herein comprises a CDR1 comprising an amino acid sequence of SEQ ID NO: 1038; a CDR2 comprising an amino acid sequence of SEQ ID NO: 1039; and a CDR3 comprising an amino acid sequence of SEQ ID NO: 1040. In some embodiments, the single domain antibody provided herein comprises a CDR1 comprising an amino acid sequence of SEQ ID NO: 1041; a CDR2 comprising an amino acid sequence of SEQ ID NO: 1042; and a CDR3 comprising an amino acid sequence of SEQ ID NO: 1043. In some embodiments, the single domain antibody provided herein comprises a CDR1 comprising an amino acid sequence of SEQ ID NO: 1044; a CDR2 comprising an amino acid sequence of SEQ ID NO: 1045; and a CDR3 comprising an amino acid sequence of SEQ ID NO: 1046. In some embodiments, the single domain antibody provided herein comprises a CDR1 comprising an amino acid sequence of SEQ ID NO: 1047; a CDR2 comprising an amino acid sequence of SEQ ID NO: 1048; and a CDR3 comprising an amino acid sequence of SEQ ID NO: 1049. In some embodiments, the single domain antibody provided herein comprises a CDR1 comprising an amino acid sequence of SEQ ID NO: 1050; a CDR2 comprising an amino acid sequence of SEQ ID NO: 1051; and a CDR3 comprising an amino acid sequence of SEQ ID NO: 1052. In some embodiments, the single domain antibody provided herein comprises a CDR1 comprising an amino acid sequence of SEQ ID NO: 1053; a CDR2 comprising an amino acid sequence of SEQ ID NO: 1054; and a CDR3 comprising an amino acid sequence of SEQ ID NO: 1055. In some embodiments, the single domain antibody provided herein comprises a CDR1 comprising an amino acid sequence of SEQ ID NO: 1056; a CDR2 comprising an amino acid sequence of SEQ ID NO: 1057; and a CDR3 comprising an amino acid sequence of SEQ ID NO: 1058. In some embodiments, the single domain antibody provided herein comprises a CDR1 comprising an amino acid sequence of SEQ ID NO: 1059; a CDR2 comprising an amino acid sequence of SEQ ID NO: 1060; and a CDR3 comprising an amino acid sequence of SEQ ID NO: 1061. In some embodiments, the single domain antibody provided herein comprises a CDR1 comprising an amino acid sequence of SEQ ID NO: 1062; a CDR2 comprising an amino acid sequence of SEQ ID NO: 1063; and a CDR3 comprising an amino acid sequence of SEQ ID NO: 1064. In some embodiments, the single domain antibody provided herein comprises a CDR1 comprising an amino acid sequence of SEQ ID NO: 1065; a CDR2 comprising an amino acid sequence of SEQ ID NO: 1066; and a CDR3 comprising an amino acid sequence of SEQ ID NO: 1067. In some embodiments, the single domain antibody provided herein comprises a CDR1 comprising an amino acid sequence of SEQ ID NO: 1068; a CDR2 comprising an amino acid sequence of SEQ ID NO: 1069; and a CDR3 comprising an amino acid sequence of SEQ ID NO: 1070. In some embodiments, the single domain antibody provided herein comprises a CDR1 comprising an amino acid sequence of SEQ ID NO: 1071; a CDR2 comprising an amino acid sequence of SEQ ID NO: 1072; and a CDR3 comprising an amino acid sequence of SEQ ID NO: 1073. In some embodiments, the single domain antibody provided herein comprises a CDR1 comprising an amino acid sequence of SEQ ID NO: 1074; a CDR2 comprising an amino acid sequence of SEQ ID NO: 1075; and a CDR3 comprising an amino acid sequence of SEQ ID NO: 1076. In some embodiments, the single domain antibody provided herein comprises a CDR1 comprising an amino acid sequence of SEQ ID NO: 1077; a CDR2 comprising an amino acid sequence of SEQ ID NO: 1078; and a CDR3 comprising an amino acid sequence of SEQ ID NO: 1079. In some embodiments, the single domain antibody provided herein comprises a CDR1 comprising an amino acid sequence of SEQ ID NO: 1080; a CDR2 comprising an amino acid sequence of SEQ ID NO: 1081; and a CDR3 comprising an amino acid sequence of SEQ ID NO: 1082. In some embodiments, the single domain antibody provided herein comprises a CDR1 comprising an amino acid sequence of SEQ ID NO: 1083; a CDR2 comprising an amino acid sequence of SEQ ID NO: 1084; and a CDR3 comprising an amino acid sequence of SEQ ID NO: 1085. In some embodiments, the single domain antibody provided herein comprises a CDR1 comprising an amino acid sequence of SEQ ID NO: 1086; a CDR2 comprising an amino acid sequence of SEQ ID NO: 1087; and a CDR3 comprising an amino acid sequence of SEQ ID NO: 1088. In some embodiments, the single domain antibody provided herein comprises a CDR1 comprising an amino acid sequence of SEQ ID NO: 1089; a CDR2 comprising an amino acid sequence of SEQ ID NO: 1090; and a CDR3 comprising an amino acid sequence of SEQ ID NO: 1091. In some embodiments, the single domain antibody provided herein comprises a CDR1 comprising an amino acid sequence of SEQ ID NO: 1092; a CDR2 comprising an amino acid sequence of SEQ ID NO: 1093; and a CDR3 comprising an amino acid sequence of SEQ ID NO: 1094. In some embodiments, the single domain antibody provided herein comprises a CDR1 comprising an amino acid sequence of SEQ ID NO: 1095; a CDR2 comprising an amino acid sequence of SEQ ID NO: 1096; and a CDR3 comprising an amino acid sequence of SEQ ID NO: 1097. In some embodiments, the single domain antibody provided herein comprises a CDR1 comprising an amino acid sequence of SEQ ID NO: 1098; a CDR2 comprising an amino acid sequence of SEQ ID NO: 1099; and a CDR3 comprising an amino acid sequence of SEQ ID NO: 1100. In some embodiments, the single domain antibody provided herein comprises a CDR1 comprising an amino acid sequence of SEQ ID NO: 1101; a CDR2 comprising an amino acid sequence of SEQ ID NO: 1102; and a CDR3 comprising an amino acid sequence of SEQ ID NO: 1103. In some embodiments, the single domain antibody provided herein comprises a CDR1 comprising an amino acid sequence of SEQ ID NO: 1104; a CDR2 comprising an amino acid sequence of SEQ ID NO: 1105; and a CDR3 comprising an amino acid sequence of SEQ ID NO: 1106. In some embodiments, the single domain antibody provided herein comprises a CDR1 comprising an amino acid sequence of SEQ ID NO: 1107; a CDR2 comprising an amino acid sequence of SEQ ID NO: 1108; and a CDR3 comprising an amino acid sequence of SEQ ID NO: 1109. In some embodiments, the single domain antibody provided herein comprises a CDR1 comprising an amino acid sequence of SEQ ID NO: 1110; a CDR2 comprising an amino acid sequence of SEQ ID NO: 1111; and a CDR3 comprising an amino acid sequence of SEQ ID NO: 1112. In some embodiments, the single domain antibody provided herein comprises a CDR1 comprising an amino acid sequence of SEQ ID NO: 1113; a CDR2 comprising an amino acid sequence of SEQ ID NO: 1114; and a CDR3 comprising an amino acid sequence of SEQ ID NO: 1115. In some embodiments, the single domain antibody provided herein comprises a CDR1 comprising an amino acid sequence of SEQ ID NO: 1116; a CDR2 comprising an amino acid sequence of SEQ ID NO: 1117; and a CDR3 comprising an amino acid sequence of SEQ ID NO: 1118. In some embodiments, the single domain antibody provided herein comprises a CDR1 comprising an amino acid sequence of SEQ ID NO: 1119; a CDR2 comprising an amino acid sequence of SEQ ID NO: 1120; and a CDR3 comprising an amino acid sequence of SEQ ID NO: 1121. In some embodiments, the single domain antibody provided herein comprises a CDR1 comprising an amino acid sequence of SEQ ID NO: 1122; a CDR2 comprising an amino acid sequence of SEQ ID NO: 1123; and a CDR3 comprising an amino acid sequence of SEQ ID NO: 1124. In some embodiments, the single domain antibody provided herein comprises a CDR1 comprising an amino acid sequence of SEQ ID NO: 1125; a CDR2 comprising an amino acid sequence of SEQ ID NO: 1126; and a CDR3 comprising an amino acid sequence of SEQ ID NO: 1127. In some embodiments, the single domain antibody provided herein comprises a CDR1 comprising an amino acid sequence of SEQ ID NO: 1128; a CDR2 comprising an amino acid sequence of SEQ ID NO: 1129; and a CDR3 comprising an amino acid sequence of SEQ ID NO: 1130. In some embodiments, the single domain antibody provided herein comprises a CDR1 comprising an amino acid sequence of SEQ ID NO: 1131; a CDR2 comprising an amino acid sequence of SEQ ID NO: 1132; and a CDR3 comprising an amino acid sequence of SEQ ID NO: 1133. In some embodiments, the single domain antibody provided herein comprises a CDR1 comprising an amino acid sequence of SEQ ID NO: 1134; a CDR2 comprising an amino acid sequence of SEQ ID NO: 1135; and a CDR3 comprising an amino acid sequence of SEQ ID NO: 1136. In some embodiments, the single domain antibody provided herein comprises a CDR1 comprising an amino acid sequence of SEQ ID NO: 1137; a CDR2 comprising an amino acid sequence of SEQ ID NO: 1138; and a CDR3 comprising an amino acid sequence of SEQ ID NO: 1139. In some embodiments, the single domain antibody provided herein comprises a CDR1 comprising an amino acid sequence of SEQ ID NO: 1140; a CDR2 comprising an amino acid sequence of SEQ ID NO: 1141; and a CDR3 comprising an amino acid sequence of SEQ ID NO: 1142. In some embodiments, the single domain antibody provided herein comprises a CDR1 comprising an amino acid sequence of SEQ ID NO: 1143; a CDR2 comprising an amino acid sequence of SEQ ID NO: 1144; and a CDR3 comprising an amino acid sequence of SEQ ID NO: 1145. In some embodiments, the single domain antibody provided herein comprises a CDR1 comprising an amino acid sequence of SEQ ID NO: 1146; a CDR2 comprising an amino acid sequence of SEQ ID NO: 1147; and a CDR3 comprising an amino acid sequence of SEQ ID NO: 1148. In some embodiments, the single domain antibody provided herein comprises a CDR1 comprising an amino acid sequence of SEQ ID NO: 1149; a CDR2 comprising an amino acid sequence of SEQ ID NO: 1150; and a CDR3 comprising an amino acid sequence of SEQ ID NO: 1151. In some embodiments, the single domain antibody provided herein comprises a CDR1 comprising an amino acid sequence of SEQ ID NO: 1152; a CDR2 comprising an amino acid sequence of SEQ ID NO: 1153; and a CDR3 comprising an amino acid sequence of SEQ ID NO: 1154. In some embodiments, the single domain antibody provided herein comprises a CDR1 comprising an amino acid sequence of SEQ ID NO: 1155; a CDR2 comprising an amino acid sequence of SEQ ID NO: 1156; and a CDR3 comprising an amino acid sequence of SEQ ID NO: 1157. In some embodiments, the single domain antibody provided herein comprises a CDR1 comprising an amino acid sequence of SEQ ID NO: 1158; a CDR2 comprising an amino acid sequence of SEQ ID NO: 1159; and a CDR3 comprising an amino acid sequence of SEQ ID NO: 1160. In some embodiments, the single domain antibody provided herein comprises a CDR1 comprising an amino acid sequence of SEQ ID NO: 1161; a CDR2 comprising an amino acid sequence of SEQ ID NO: 1162; and a CDR3 comprising an amino acid sequence of SEQ ID NO: 1163. In some embodiments, the single domain antibody provided herein comprises a CDR1 comprising an amino acid sequence of SEQ ID NO: 1164; a CDR2 comprising an amino acid sequence of SEQ ID NO: 1165; and a CDR3 comprising an amino acid sequence of SEQ ID NO: 1166. In some embodiments, the single domain antibody provided herein comprises a CDR1 comprising an amino acid sequence of SEQ ID NO: 1167; a CDR2 comprising an amino acid sequence of SEQ ID NO: 1168; and a CDR3 comprising an amino acid sequence of SEQ ID NO: 1169. In some embodiments, the single domain antibody provided herein comprises a CDR1 comprising an amino acid sequence of SEQ ID NO: 1170; a CDR2 comprising an amino acid sequence of SEQ ID NO: 1171; and a CDR3 comprising an amino acid sequence of SEQ ID NO: 1172. In some embodiments, the single domain antibody provided herein comprises a CDR1 comprising an amino acid sequence of SEQ ID NO: 1173; a CDR2 comprising an amino acid sequence of SEQ ID NO: 1174; and a CDR3 comprising an amino acid sequence of SEQ ID NO: 1175. In some embodiments, the single domain antibody provided herein comprises a CDR1 comprising an amino acid sequence of SEQ ID NO: 1176; a CDR2 comprising an amino acid sequence of SEQ ID NO: 1177; and a CDR3 comprising an amino acid sequence of SEQ ID NO: 1178. In some embodiments, the single domain antibody provided herein comprises a CDR1 comprising an amino acid sequence of SEQ ID NO: 1179; a CDR2 comprising an amino acid sequence of SEQ ID NO: 1180; and a CDR3 comprising an amino acid sequence of SEQ ID NO: 1181. In some embodiments, the single domain antibody provided herein comprises a CDR1 comprising an amino acid sequence of SEQ ID NO: 1182; a CDR2 comprising an amino acid sequence of SEQ ID NO: 1183; and a CDR3 comprising an amino acid sequence of SEQ ID NO: 1184. In some embodiments, the single domain antibody provided herein comprises a CDR1 comprising an amino acid sequence of SEQ ID NO: 1185; a CDR2 comprising an amino acid sequence of SEQ ID NO: 1186; and a CDR3 comprising an amino acid sequence of SEQ ID NO: 1187. In some embodiments, the single domain antibody provided herein comprises a CDR1 comprising an amino acid sequence of SEQ ID NO: 1188; a CDR2 comprising an amino acid sequence of SEQ ID NO: 1189; and a CDR3 comprising an amino acid sequence of SEQ ID NO: 1190. In some embodiments, the single domain antibody provided herein comprises a CDR1 comprising an amino acid sequence of SEQ ID NO: 1191; a CDR2 comprising an amino acid sequence of SEQ ID NO: 1192; and a CDR3 comprising an amino acid sequence of SEQ ID NO: 1193. In some embodiments, the single domain antibody provided herein comprises a CDR1 comprising an amino acid sequence of SEQ ID NO: 1194; a CDR2 comprising an amino acid sequence of SEQ ID NO: 1195; and a CDR3 comprising an amino acid sequence of SEQ ID NO: 1196. In some embodiments, the single domain antibody provided herein comprises a CDR1 comprising an amino acid sequence of SEQ ID NO: 1197; a CDR2 comprising an amino acid sequence of SEQ ID NO: 1198; and a CDR3 comprising an amino acid sequence of SEQ ID NO: 1199. In some embodiments, the single domain antibody provided herein comprises a CDR1 comprising an amino acid sequence of SEQ ID NO: 1200; a CDR2 comprising an amino acid sequence of SEQ ID NO: 1201; and a CDR3 comprising an amino acid sequence of SEQ ID NO: 1202. In some embodiments, the single domain antibody provided herein comprises a CDR1 comprising an amino acid sequence of SEQ ID NO: 1203; a CDR2 comprising an amino acid sequence of SEQ ID NO: 1204; and a CDR3 comprising an amino acid sequence of SEQ ID NO: 1205. In some embodiments, the single domain antibody provided herein comprises a CDR1 comprising an amino acid sequence of SEQ ID NO: 1206; a CDR2 comprising an amino acid sequence of SEQ ID NO: 1207; and a CDR3 comprising an amino acid sequence of SEQ ID NO: 1208. In some embodiments, the single domain antibody provided herein comprises a CDR1 comprising an amino acid sequence of SEQ ID NO: 1209; a CDR2 comprising an amino acid sequence of SEQ ID NO: 1210; and a CDR3 comprising an amino acid sequence of SEQ ID NO: 1211. In some embodiments, the single domain antibody provided herein comprises a CDR1 comprising an amino acid sequence of SEQ ID NO: 1212; a CDR2 comprising an amino acid sequence of SEQ ID NO: 1213; and a CDR3 comprising an amino acid sequence of SEQ ID NO: 1214. In some embodiments, the single domain antibody provided herein comprises a CDR1 comprising an amino acid sequence of SEQ ID NO: 1215; a CDR2 comprising an amino acid sequence of SEQ ID NO: 1216; and a CDR3 comprising an amino acid sequence of SEQ ID NO: 1217. In some embodiments, the single domain antibody provided herein comprises a CDR1 comprising an amino acid sequence of SEQ ID NO: 1218; a CDR2 comprising an amino acid sequence of SEQ ID NO: 1219; and a CDR3 comprising an amino acid sequence of SEQ ID NO: 1220. In some embodiments, the single domain antibody provided herein comprises a CDR1 comprising an amino acid sequence of SEQ ID NO: 1221; a CDR2 comprising an amino acid sequence of SEQ ID NO: 1222; and a CDR3 comprising an amino acid sequence of SEQ ID NO: 1223. In some embodiments, the single domain antibody provided herein comprises a CDR1 comprising an amino acid sequence of SEQ ID NO: 1224; a CDR2 comprising an amino acid sequence of SEQ ID NO: 1225; and a CDR3 comprising an amino acid sequence of SEQ ID NO: 1226. In some embodiments, the single domain antibody provided herein comprises a CDR1 comprising an amino acid sequence of SEQ ID NO: 1227; a CDR2 comprising an amino acid sequence of SEQ ID NO: 1228; and a CDR3 comprising an amino acid sequence of SEQ ID NO: 1229. In some embodiments, the single domain antibody provided herein comprises a CDR1 comprising an amino acid sequence of SEQ ID NO: 1230; a CDR2 comprising an amino acid sequence of SEQ ID NO: 1231; and a CDR3 comprising an amino acid sequence of SEQ ID NO: 1232. In some embodiments, the single domain antibody provided herein comprises a CDR1 comprising an amino acid sequence of SEQ ID NO: 1233; a CDR2 comprising an amino acid sequence of SEQ ID NO: 1234; and a CDR3 comprising an amino acid sequence of SEQ ID NO: 1235. In some embodiments, the single domain antibody provided herein comprises a CDR1 comprising an amino acid sequence of SEQ ID NO: 1236; a CDR2 comprising an amino acid sequence of SEQ ID NO: 1237; and a CDR3 comprising an amino acid sequence of SEQ ID NO: 1238. In some embodiments, the single domain antibody provided herein comprises a CDR1 comprising an amino acid sequence of SEQ ID NO: 1239; a CDR2 comprising an amino acid sequence of SEQ ID NO: 1240; and a CDR3 comprising an amino acid sequence of SEQ ID NO: 1241. In some embodiments, the single domain antibody provided herein comprises a CDR1 comprising an amino acid sequence of SEQ ID NO: 1242; a CDR2 comprising an amino acid sequence of SEQ ID NO: 1243; and a CDR3 comprising an amino acid sequence of SEQ ID NO: 1244. In some embodiments, the single domain antibody provided herein comprises a CDR1 comprising an amino acid sequence of SEQ ID NO: 1245; a CDR2 comprising an amino acid sequence of SEQ ID NO: 1246; and a CDR3 comprising an amino acid sequence of SEQ ID NO: 1247. In some embodiments, the single domain antibody provided herein comprises a CDR1 comprising an amino acid sequence of SEQ ID NO: 1248; a CDR2 comprising an amino acid sequence of SEQ ID NO: 1249; and a CDR3 comprising an amino acid sequence of SEQ ID NO: 1250. In some embodiments, the single domain antibody provided herein comprises a CDR1 comprising an amino acid sequence of SEQ ID NO: 1251; a CDR2 comprising an amino acid sequence of SEQ ID NO: 1252; and a CDR3 comprising an amino acid sequence of SEQ ID NO: 1253. In some embodiments, the single domain antibody provided herein comprises a CDR1 comprising an amino acid sequence of SEQ ID NO: 1254; a CDR2 comprising an amino acid sequence of SEQ ID NO: 1255; and a CDR3 comprising an amino acid sequence of SEQ ID NO: 1256. In some embodiments, the single domain antibody provided herein comprises a CDR1 comprising an amino acid sequence of SEQ ID NO: 1257; a CDR2 comprising an amino acid sequence of SEQ ID NO: 1258; and a CDR3 comprising an amino acid sequence of SEQ ID NO: 1259. In some embodiments, the single domain antibody provided herein comprises a CDR1 comprising an amino acid sequence of SEQ ID NO: 1260; a CDR2 comprising an amino acid sequence of SEQ ID NO: 1261; and a CDR3 comprising an amino acid sequence of SEQ ID NO: 1262. In some embodiments, the single domain antibody provided herein comprises a CDR1 comprising an amino acid sequence of SEQ ID NO: 1263; a CDR2 comprising an amino acid sequence of SEQ ID NO: 1264; and a CDR3 comprising an amino acid sequence of SEQ ID NO: 1265. In some embodiments, the single domain antibody provided herein comprises a CDR1 comprising an amino acid sequence of SEQ ID NO: 1266; a CDR2 comprising an amino acid sequence of SEQ ID NO: 1267; and a CDR3 comprising an amino acid sequence of SEQ ID NO: 1268. In some embodiments, the single domain antibody provided herein comprises a CDR1 comprising an amino acid sequence of SEQ ID NO: 1269; a CDR2 comprising an amino acid sequence of SEQ ID NO: 1270; and a CDR3 comprising an amino acid sequence of SEQ ID NO: 1271. In some embodiments, the single domain antibody provided herein comprises a CDR1 comprising an amino acid sequence of SEQ ID NO: 1272; a CDR2 comprising an amino acid sequence of SEQ ID NO: 1273; and a CDR3 comprising an amino acid sequence of SEQ ID NO: 1274. In some embodiments, the single domain antibody provided herein comprises a CDR1 comprising an amino acid sequence of SEQ ID NO: 1275; a CDR2 comprising an amino acid sequence of SEQ ID NO: 1276; and a CDR3 comprising an amino acid sequence of SEQ ID NO: 1277. In some embodiments, the single domain antibody provided herein comprises a CDR1 comprising an amino acid sequence of SEQ ID NO: 1278; a CDR2 comprising an amino acid sequence of SEQ ID NO: 1279; and a CDR3 comprising an amino acid sequence of SEQ ID NO: 1280. In some embodiments, the single domain antibody provided herein comprises a CDR1 comprising an amino acid sequence of SEQ ID NO: 1281; a CDR2 comprising an amino acid sequence of SEQ ID NO: 1282; and a CDR3 comprising an amino acid sequence of SEQ ID NO: 1283. In some embodiments, the single domain antibody provided herein comprises a CDR1 comprising an amino acid sequence of SEQ ID NO: 1284; a CDR2 comprising an amino acid sequence of SEQ ID NO: 1285; and a CDR3 comprising an amino acid sequence of SEQ ID NO: 1286. In some embodiments, the single domain antibody provided herein comprises a CDR1 comprising an amino acid sequence of SEQ ID NO: 1287; a CDR2 comprising an amino acid sequence of SEQ ID NO: 1288; and a CDR3 comprising an amino acid sequence of SEQ ID NO: 1289. In some embodiments, the single domain antibody provided herein comprises a CDR1 comprising an amino acid sequence of SEQ ID NO: 1290; a CDR2 comprising an amino acid sequence of SEQ ID NO: 1291; and a CDR3 comprising an amino acid sequence of SEQ ID NO: 1292. In some embodiments, the single domain antibody provided herein comprises a CDR1 comprising an amino acid sequence of SEQ ID NO: 1293; a CDR2 comprising an amino acid sequence of SEQ ID NO: 1294; and a CDR3 comprising an amino acid sequence of SEQ ID NO: 1295. In some embodiments, the single domain antibody provided herein comprises a CDR1 comprising an amino acid sequence of SEQ ID NO: 1296; a CDR2 comprising an amino acid sequence of SEQ ID NO: 1297; and a CDR3 comprising an amino acid sequence of SEQ ID NO: 1298. In some embodiments, the single domain antibody provided herein comprises a CDR1 comprising an amino acid sequence of SEQ ID NO: 1299; a CDR2 comprising an amino acid sequence of SEQ ID NO: 1300; and a CDR3 comprising an amino acid sequence of SEQ ID NO: 1301. In some embodiments, the single domain antibody provided herein comprises a CDR1 comprising an amino acid sequence of SEQ ID NO: 1302; a CDR2 comprising an amino acid sequence of SEQ ID NO: 1303; and a CDR3 comprising an amino acid sequence of SEQ ID NO: 1304. In some embodiments, the single domain antibody provided herein comprises a CDR1 comprising an amino acid sequence of SEQ ID NO: 1305; a CDR2 comprising an amino acid sequence of SEQ ID NO: 1306; and a CDR3 comprising an amino acid sequence of SEQ ID NO: 1307. In some embodiments, the single domain antibody provided herein comprises a CDR1 comprising an amino acid sequence of SEQ ID NO: 1308; a CDR2 comprising an amino acid sequence of SEQ ID NO: 1309; and a CDR3 comprising an amino acid sequence of SEQ ID NO: 1310. In some embodiments, the single domain antibody provided herein comprises a CDR1 comprising an amino acid sequence of SEQ ID NO: 1311; a CDR2 comprising an amino acid sequence of SEQ ID NO: 1312; and a CDR3 comprising an amino acid sequence of SEQ ID NO: 1313. In some embodiments, the single domain antibody provided herein comprises a CDR1 comprising an amino acid sequence of SEQ ID NO: 1314; a CDR2 comprising an amino acid sequence of SEQ ID NO: 1315; and a CDR3 comprising an amino acid sequence of SEQ ID NO: 1316. In some embodiments, the single domain antibody provided herein comprises a CDR1 comprising an amino acid sequence of SEQ ID NO: 1317; a CDR2 comprising an amino acid sequence of SEQ ID NO: 1318; and a CDR3 comprising an amino acid sequence of SEQ ID NO: 1319. In some embodiments, the single domain antibody provided herein comprises a CDR1 comprising an amino acid sequence of SEQ ID NO: 1320; a CDR2 comprising an amino acid sequence of SEQ ID NO: 1321; and a CDR3 comprising an amino acid sequence of SEQ ID NO: 1322. In some embodiments, the single domain antibody provided herein comprises a CDR1 comprising an amino acid sequence of SEQ ID NO: 1323; a CDR2 comprising an amino acid sequence of SEQ ID NO: 1324; and a CDR3 comprising an amino acid sequence of SEQ ID NO: 1325. In some embodiments, the single domain antibody provided herein comprises a CDR1 comprising an amino acid sequence of SEQ ID NO: 1326; a CDR2 comprising an amino acid sequence of SEQ ID NO: 1327; and a CDR3 comprising an amino acid sequence of SEQ ID NO: 1328. In some embodiments, the single domain antibody provided herein comprises a CDR1 comprising an amino acid sequence of SEQ ID NO: 1329; a CDR2 comprising an amino acid sequence of SEQ ID NO: 1330; and a CDR3 comprising an amino acid sequence of SEQ ID NO: 1331. In some embodiments, the single domain antibody provided herein comprises a CDR1 comprising an amino acid sequence of SEQ ID NO: 1332; a CDR2 comprising an amino acid sequence of SEQ ID NO: 1333; and a CDR3 comprising an amino acid sequence of SEQ ID NO: 1334. In some embodiments, the single domain antibody provided herein comprises a CDR1 comprising an amino acid sequence of SEQ ID NO: 1335; a CDR2 comprising an amino acid sequence of SEQ ID NO: 1336; and a CDR3 comprising an amino acid sequence of SEQ ID NO: 1337. In some embodiments, the single domain antibody provided herein comprises a CDR1 comprising an amino acid sequence of SEQ ID NO: 1338; a CDR2 comprising an amino acid sequence of SEQ ID NO: 1339; and a CDR3 comprising an amino acid sequence of SEQ ID NO: 1340. In some embodiments, the single domain antibody provided herein comprises a CDR1 comprising an amino acid sequence of SEQ ID NO: 1341; a CDR2 comprising an amino acid sequence of SEQ ID NO: 1342; and a CDR3 comprising an amino acid sequence of SEQ ID NO: 1343. In some embodiments, the single domain antibody provided herein comprises a CDR1 comprising an amino acid sequence of SEQ ID NO: 1344; a CDR2 comprising an amino acid sequence of SEQ ID NO: 1345; and a CDR3 comprising an amino acid sequence of SEQ ID NO: 1346. In some embodiments, the single domain antibody provided herein comprises a CDR1 comprising an amino acid sequence of SEQ ID NO: 1347; a CDR2 comprising an amino acid sequence of SEQ ID NO: 1348; and a CDR3 comprising an amino acid sequence of SEQ ID NO: 1349. In some embodiments, the single domain antibody provided herein comprises a CDR1 comprising an amino acid sequence of SEQ ID NO: 1350; a CDR2 comprising an amino acid sequence of SEQ ID NO: 1351; and a CDR3 comprising an amino acid sequence of SEQ ID NO: 1352. In some embodiments, the single domain antibody provided herein comprises a CDR1 comprising an amino acid sequence of SEQ ID NO: 1353; a CDR2 comprising an amino acid sequence of SEQ ID NO: 1354; and a CDR3 comprising an amino acid sequence of SEQ ID NO: 1355. In some embodiments, the single domain antibody provided herein comprises a CDR1 comprising an amino acid sequence of SEQ ID NO: 1356; a CDR2 comprising an amino acid sequence of SEQ ID NO: 1357; and a CDR3 comprising an amino acid sequence of SEQ ID NO: 1358. In some embodiments, the single domain antibody provided herein comprises a CDR1 comprising an amino acid sequence of SEQ ID NO: 1359; a CDR2 comprising an amino acid sequence of SEQ ID NO: 1360; and a CDR3 comprising an amino acid sequence of SEQ ID NO: 1361. In some embodiments, the single domain antibody provided herein comprises a CDR1 comprising an amino acid sequence of SEQ ID NO: 1362; a CDR2 comprising an amino acid sequence of SEQ ID NO: 1363; and a CDR3 comprising an amino acid sequence of SEQ ID NO: 1364. In some embodiments, the single domain antibody provided herein comprises a CDR1 comprising an amino acid sequence of SEQ ID NO: 1365; a CDR2 comprising an amino acid sequence of SEQ ID NO: 1366; and a CDR3 comprising an amino acid sequence of SEQ ID NO: 1367. In some embodiments, the single domain antibody provided herein comprises a CDR1 comprising an amino acid sequence of SEQ ID NO: 1368; a CDR2 comprising an amino acid sequence of SEQ ID NO: 1369; and a CDR3 comprising an amino acid sequence of SEQ ID NO: 1370. In some embodiments, the single domain antibody provided herein comprises a CDR1 comprising an amino acid sequence of SEQ ID NO: 1371; a CDR2 comprising an amino acid sequence of SEQ ID NO: 1372; and a CDR3 comprising an amino acid sequence of SEQ ID NO: 1373. In some embodiments, the single domain antibody provided herein comprises a CDR1 comprising an amino acid sequence of SEQ ID NO: 1374; a CDR2 comprising an amino acid sequence of SEQ ID NO: 1375; and a CDR3 comprising an amino acid sequence of SEQ ID NO: 1376. In some embodiments, the single domain antibody provided herein comprises a CDR1 comprising an amino acid sequence of SEQ ID NO: 1377; a CDR2 comprising an amino acid sequence of SEQ ID NO: 1378; and a CDR3 comprising an amino acid sequence of SEQ ID NO: 1379. In some embodiments, the single domain antibody provided herein comprises a CDR1 comprising an amino acid sequence of SEQ ID NO: 1380; a CDR2 comprising an amino acid sequence of SEQ ID NO: 1381; and a CDR3 comprising an amino acid sequence of SEQ ID NO: 1382. In some embodiments, the single domain antibody provided herein comprises a CDR1 comprising an amino acid sequence of SEQ ID NO: 1383; a CDR2 comprising an amino acid sequence of SEQ ID NO: 1384; and a CDR3 comprising an amino acid sequence of SEQ ID NO: 1385. In some embodiments, the single domain antibody provided herein comprises a CDR1 comprising an amino acid sequence of SEQ ID NO: 1386; a CDR2 comprising an amino acid sequence of SEQ ID NO: 1387; and a CDR3 comprising an amino acid sequence of SEQ ID NO: 1388. In some embodiments, the single domain antibody provided herein comprises a CDR1 comprising an amino acid sequence of SEQ ID NO: 1389; a CDR2 comprising an amino acid sequence of SEQ ID NO: 1390; and a CDR3 comprising an amino acid sequence of SEQ ID NO: 1391. In some embodiments, the single domain antibody provided herein comprises a CDR1 comprising an amino acid sequence of SEQ ID NO: 1392; a CDR2 comprising an amino acid sequence of SEQ ID NO: 1393; and a CDR3 comprising an amino acid sequence of SEQ ID NO: 1394. In some embodiments, the single domain antibody provided herein comprises a CDR1 comprising an amino acid sequence of SEQ ID NO: 1395; a CDR2 comprising an amino acid sequence of SEQ ID NO: 1396; and a CDR3 comprising an amino acid sequence of SEQ ID NO: 1397. In some embodiments, the single domain antibody provided herein comprises a CDR1 comprising an amino acid sequence of SEQ ID NO: 1398; a CDR2 comprising an amino acid sequence of SEQ ID NO: 1399; and a CDR3 comprising an amino acid sequence of SEQ ID NO: 1400. In some embodiments, the single domain antibody provided herein comprises a CDR1 comprising an amino acid sequence of SEQ ID NO: 1401; a CDR2 comprising an amino acid sequence of SEQ ID NO: 1402; and a CDR3 comprising an amino acid sequence of SEQ ID NO: 1403. In some embodiments, the single domain antibody provided herein comprises a CDR1 comprising an amino acid sequence of SEQ ID NO: 1404; a CDR2 comprising an amino acid sequence of SEQ ID NO: 1405; and a CDR3 comprising an amino acid sequence of SEQ ID NO: 1406. In some embodiments, the single domain antibody provided herein comprises a CDR1 comprising an amino acid sequence of SEQ ID NO: 1407; a CDR2 comprising an amino acid sequence of SEQ ID NO: 1408; and a CDR3 comprising an amino acid sequence of SEQ ID NO: 1409. In some embodiments, the single domain antibody provided herein comprises a CDR1 comprising an amino acid sequence of SEQ ID NO: 1410; a CDR2 comprising an amino acid sequence of SEQ ID NO: 1411; and a CDR3 comprising an amino acid sequence of SEQ ID NO: 1412. In some embodiments, the single domain antibody provided herein comprises a CDR1 comprising an amino acid sequence of SEQ ID NO: 1413; a CDR2 comprising an amino acid sequence of SEQ ID NO: 1414; and a CDR3 comprising an amino acid sequence of SEQ ID NO: 1415. In some embodiments, the single domain antibody provided herein comprises a CDR1 comprising an amino acid sequence of SEQ ID NO: 1416; a CDR2 comprising an amino acid sequence of SEQ ID NO: 1417; and a CDR3 comprising an amino acid sequence of SEQ ID NO: 1418. In some embodiments, the single domain antibody provided herein comprises a CDR1 comprising an amino acid sequence of SEQ ID NO: 1419; a CDR2 comprising an amino acid sequence of SEQ ID NO: 1420; and a CDR3 comprising an amino acid sequence of SEQ ID NO: 1421. In some embodiments, the single domain antibody provided herein comprises a CDR1 comprising an amino acid sequence of SEQ ID NO: 1422; a CDR2 comprising an amino acid sequence of SEQ ID NO: 1423; and a CDR3 comprising an amino acid sequence of SEQ ID NO: 1424. In some embodiments, the single domain antibody provided herein comprises a CDR1 comprising an amino acid sequence of SEQ ID NO: 1425; a CDR2 comprising an amino acid sequence of SEQ ID NO: 1426; and a CDR3 comprising an amino acid sequence of SEQ ID NO: 1427. In some embodiments, the single domain antibody provided herein comprises a CDR1 comprising an amino acid sequence of SEQ ID NO: 1428; a CDR2 comprising an amino acid sequence of SEQ ID NO: 1429; and a CDR3 comprising an amino acid sequence of SEQ ID NO: 1430. In some embodiments, the single domain antibody provided herein comprises a CDR1 comprising an amino acid sequence of SEQ ID NO: 1431; a CDR2 comprising an amino acid sequence of SEQ ID NO: 1432; and a CDR3 comprising an amino acid sequence of SEQ ID NO: 1433. In some embodiments, the single domain antibody provided herein comprises a CDR1 comprising an amino acid sequence of SEQ ID NO: 1434; a CDR2 comprising an amino acid sequence of SEQ ID NO: 1435; and a CDR3 comprising an amino acid sequence of SEQ ID NO: 1436. In some embodiments, the single domain antibody provided herein comprises a CDR1 comprising an amino acid sequence of SEQ ID NO: 1437; a CDR2 comprising an amino acid sequence of SEQ ID NO: 1438; and a CDR3 comprising an amino acid sequence of SEQ ID NO: 1439. In some embodiments, the single domain antibody provided herein comprises a CDR1 comprising an amino acid sequence of SEQ ID NO: 1440; a CDR2 comprising an amino acid sequence of SEQ ID NO: 1441; and a CDR3 comprising an amino acid sequence of SEQ ID NO: 1442. In some embodiments, the single domain antibody provided herein comprises a CDR1 comprising an amino acid sequence of SEQ ID NO: 1443; a CDR2 comprising an amino acid sequence of SEQ ID NO: 1444; and a CDR3 comprising an amino acid sequence of SEQ ID NO: 1445. In some embodiments, the single domain antibody provided herein comprises a CDR1 comprising an amino acid sequence of SEQ ID NO: 1446; a CDR2 comprising an amino acid sequence of SEQ ID NO: 1447; and a CDR3 comprising an amino acid sequence of SEQ ID NO: 1448. In some embodiments, the single domain antibody provided herein comprises a CDR1 comprising an amino acid sequence of SEQ ID NO: 1449; a CDR2 comprising an amino acid sequence of SEQ ID NO: 1450; and a CDR3 comprising an amino acid sequence of SEQ ID NO: 1451. In some embodiments, the single domain antibody provided herein comprises a CDR1 comprising an amino acid sequence of SEQ ID NO: 1452; a CDR2 comprising an amino acid sequence of SEQ ID NO: 1453; and a CDR3 comprising an amino acid sequence of SEQ ID NO: 1454. In some embodiments, the single domain antibody provided herein comprises a CDR1 comprising an amino acid sequence of SEQ ID NO: 1455; a CDR2 comprising an amino acid sequence of SEQ ID NO: 1456; and a CDR3 comprising an amino acid sequence of SEQ ID NO: 1457. In some embodiments, the single domain antibody provided herein comprises a CDR1 comprising an amino acid sequence of SEQ ID NO: 1458; a CDR2 comprising an amino acid sequence of SEQ ID NO: 1459; and a CDR3 comprising an amino acid sequence of SEQ ID NO: 1460. In some embodiments, the single domain antibody provided herein comprises a CDR1 comprising an amino acid sequence of SEQ ID NO: 1461; a CDR2 comprising an amino acid sequence of SEQ ID NO: 1462; and a CDR3 comprising an amino acid sequence of SEQ ID NO: 1463. In some embodiments, the single domain antibody provided herein comprises a CDR1 comprising an amino acid sequence of SEQ ID NO: 1464; a CDR2 comprising an amino acid sequence of SEQ ID NO: 1465; and a CDR3 comprising an amino acid sequence of SEQ ID NO: 1466. In some embodiments, the single domain antibody provided herein comprises a CDR1 comprising an amino acid sequence of SEQ ID NO: 1467; a CDR2 comprising an amino acid sequence of SEQ ID NO: 1468; and a CDR3 comprising an amino acid sequence of SEQ ID NO: 1469. In some embodiments, the single domain antibody provided herein comprises a CDR1 comprising an amino acid sequence of SEQ ID NO: 1470; a CDR2 comprising an amino acid sequence of SEQ ID NO: 1471; and a CDR3 comprising an amino acid sequence of SEQ ID NO: 1472. In some embodiments, the single domain antibody provided herein comprises a CDR1 comprising an amino acid sequence of SEQ ID NO: 1473; a CDR2 comprising an amino acid sequence of SEQ ID NO: 1474; and a CDR3 comprising an amino acid sequence of SEQ ID NO: 1475. In some embodiments, the single domain antibody provided herein comprises a CDR1 comprising an amino acid sequence of SEQ ID NO: 1476; a CDR2 comprising an amino acid sequence of SEQ ID NO: 1477; and a CDR3 comprising an amino acid sequence of SEQ ID NO: 1478. In some embodiments, the single domain antibody provided herein comprises a CDR1 comprising an amino acid sequence of SEQ ID NO: 1479; a CDR2 comprising an amino acid sequence of SEQ ID NO: 1480; and a CDR3 comprising an amino acid sequence of SEQ ID NO: 1481. In some embodiments, the single domain antibody provided herein comprises a CDR1 comprising an amino acid sequence of SEQ ID NO: 1482; a CDR2 comprising an amino acid sequence of SEQ ID NO: 1483; and a CDR3 comprising an amino acid sequence of SEQ ID NO: 1484. In some embodiments, the single domain antibody provided herein comprises a CDR1 comprising an amino acid sequence of SEQ ID NO: 1485; a CDR2 comprising an amino acid sequence of SEQ ID NO: 1486; and a CDR3 comprising an amino acid sequence of SEQ ID NO: 1487. In some embodiments, the single domain antibody provided herein comprises a CDR1 comprising an amino acid sequence of SEQ ID NO: 1488; a CDR2 comprising an amino acid sequence of SEQ ID NO: 1489; and a CDR3 comprising an amino acid sequence of SEQ ID NO: 1490. In some embodiments, the single domain antibody provided herein comprises a CDR1 comprising an amino acid sequence of SEQ ID NO: 1491; a CDR2 comprising an amino acid sequence of SEQ ID NO: 1492; and a CDR3 comprising an amino acid sequence of SEQ ID NO: 1493. In some embodiments, the single domain antibody provided herein comprises a CDR1 comprising an amino acid sequence of SEQ ID NO: 1494; a CDR2 comprising an amino acid sequence of SEQ ID NO: 1495; and a CDR3 comprising an amino acid sequence of SEQ ID NO: 1496. In some embodiments, the single domain antibody provided herein comprises a CDR1 comprising an amino acid sequence of SEQ ID NO: 1497; a CDR2 comprising an amino acid sequence of SEQ ID NO: 1498; and a CDR3 comprising an amino acid sequence of SEQ ID NO: 1499.

[0417] In some embodiments, the single domain antibody provided herein comprises a CDR1 comprising an amino acid sequence of SEQ ID NO: 1500; a CDR2 comprising an amino acid sequence of SEQ ID NO: 1501; and a CDR3 comprising an amino acid sequence of SEQ ID NO: 1502. In some embodiments, the single domain antibody provided herein comprises a CDR1 comprising an amino acid sequence of SEQ ID NO: 1503; a CDR2 comprising an amino acid sequence of SEQ ID NO: 1504; and a CDR3 comprising an amino acid sequence of SEQ ID NO: 1505. In some embodiments, the single domain antibody provided herein comprises a CDR1 comprising an amino acid sequence of SEQ ID NO: 1506; a CDR2 comprising an amino acid sequence of SEQ ID NO: 1507; and a CDR3 comprising an amino acid sequence of SEQ ID NO: 1508. In some embodiments, the single domain antibody provided herein comprises a CDR1 comprising an amino acid sequence of SEQ ID NO: 1509; a CDR2 comprising an amino acid sequence of SEQ ID NO: 1510; and a CDR3 comprising an amino acid sequence of SEQ ID NO: 1511. In some embodiments, the single domain antibody provided herein comprises a CDR1 comprising an amino acid sequence of SEQ ID NO: 1512; a CDR2 comprising an amino acid sequence of SEQ ID NO: 1513; and a CDR3 comprising an amino acid sequence of SEQ ID NO: 1514. In some embodiments, the single domain antibody provided herein comprises a CDR1 comprising an amino acid sequence of SEQ ID NO: 1515; a CDR2 comprising an amino acid sequence of SEQ ID NO: 1516; and a CDR3 comprising an amino acid sequence of SEQ ID NO: 1517. In some embodiments, the single domain antibody provided herein comprises a CDR1 comprising an amino acid sequence of SEQ ID NO: 1518; a CDR2 comprising an amino acid sequence of SEQ ID NO: 1519; and a CDR3 comprising an amino acid sequence of SEQ ID NO: 1520. In some embodiments, the single domain antibody provided herein comprises a CDR1 comprising an amino acid sequence of SEQ ID NO: 1521; a CDR2 comprising an amino acid sequence of SEQ ID NO: 1522; and a CDR3 comprising an amino acid sequence of SEQ ID NO: 1523. In some embodiments, the single domain antibody provided herein comprises a CDR1 comprising an amino acid sequence of SEQ ID NO: 1524; a CDR2 comprising an amino acid sequence of SEQ ID NO: 1525; and a CDR3 comprising an amino acid sequence of SEQ ID NO: 1526. In some embodiments, the single domain antibody provided herein comprises a CDR1 comprising an amino acid sequence of SEQ ID NO: 1527; a CDR2 comprising an amino acid sequence of SEQ ID NO: 1528; and a CDR3 comprising an amino acid sequence of SEQ ID NO: 1529. In some embodiments, the single domain antibody provided herein comprises a CDR1 comprising an amino acid sequence of SEQ ID NO: 1530; a CDR2 comprising an amino acid sequence of SEQ ID NO: 1531; and a CDR3 comprising an amino acid sequence of SEQ ID NO: 1532. In some embodiments, the single domain antibody provided herein comprises a CDR1 comprising an amino acid sequence of SEQ ID NO: 1533; a CDR2 comprising an amino acid sequence of SEQ ID NO: 1534; and a CDR3 comprising an amino acid sequence of SEQ ID NO: 1535. In some embodiments, the single domain antibody provided herein comprises a CDR1 comprising an amino acid sequence of SEQ ID NO: 1536; a CDR2 comprising an amino acid sequence of SEQ ID NO: 1537; and a CDR3 comprising an amino acid sequence of SEQ ID NO: 1538. In some embodiments, the single domain antibody provided herein comprises a CDR1 comprising an amino acid sequence of SEQ ID NO: 1539; a CDR2 comprising an amino acid sequence of SEQ ID NO: 1540; and a CDR3 comprising an amino acid sequence of SEQ ID NO: 1541. In some embodiments, the single domain antibody provided herein comprises a CDR1 comprising an amino acid sequence of SEQ ID NO: 1542; a CDR2 comprising an amino acid sequence of SEQ ID NO: 1543; and a CDR3 comprising an amino acid sequence of SEQ ID NO: 1544. In some embodiments, the single domain antibody provided herein comprises a CDR1 comprising an amino acid sequence of SEQ ID NO: 1545; a CDR2 comprising an amino acid sequence of SEQ ID NO: 1546; and a CDR3 comprising an amino acid sequence of SEQ ID NO: 1547. In some embodiments, the single domain antibody provided herein comprises a CDR1 comprising an amino acid sequence of SEQ ID NO: 1548; a CDR2 comprising an amino acid sequence of SEQ ID NO: 1549; and a CDR3 comprising an amino acid sequence of SEQ ID NO: 1550. In some embodiments, the single domain antibody provided herein comprises a CDR1 comprising an amino acid sequence of SEQ ID NO: 1551; a CDR2 comprising an amino acid sequence of SEQ ID NO: 1552; and a CDR3 comprising an amino acid sequence of SEQ ID NO: 1553. In some embodiments, the single domain antibody provided herein comprises a CDR1 comprising an amino acid sequence of SEQ ID NO: 1554; a CDR2 comprising an amino acid sequence of SEQ ID NO: 1555; and a CDR3 comprising an amino acid sequence of SEQ ID NO: 1556. In some embodiments, the single domain antibody provided herein comprises a CDR1 comprising an amino acid sequence of SEQ ID NO: 1557; a CDR2 comprising an amino acid sequence of SEQ ID NO: 1558; and a CDR3 comprising an amino acid sequence of SEQ ID NO: 1559. In some embodiments, the single domain antibody provided herein comprises a CDR1 comprising an amino acid sequence of SEQ ID NO: 1560; a CDR2 comprising an amino acid sequence of SEQ ID NO: 1561; and a CDR3 comprising an amino acid sequence of SEQ ID NO: 1562. In some embodiments, the single domain antibody provided herein comprises a CDR1 comprising an amino acid sequence of SEQ ID NO: 1563; a CDR2 comprising an amino acid sequence of SEQ ID NO: 1564; and a CDR3 comprising an amino acid sequence of SEQ ID NO: 1565. In some embodiments, the single domain antibody provided herein comprises a CDR1 comprising an amino acid sequence of SEQ ID NO: 1566; a CDR2 comprising an amino acid sequence of SEQ ID NO: 1567; and a CDR3 comprising an amino acid sequence of SEQ ID NO: 1568. In some embodiments, the single domain antibody provided herein comprises a CDR1 comprising an amino acid sequence of SEQ ID NO: 1569; a CDR2 comprising an amino acid sequence of SEQ ID NO: 1570; and a CDR3 comprising an amino acid sequence of SEQ ID NO: 1571. In some embodiments, the single domain antibody provided herein comprises a CDR1 comprising an amino acid sequence of SEQ ID NO: 1572; a CDR2 comprising an amino acid sequence of SEQ ID NO: 1573; and a CDR3 comprising an amino acid sequence of SEQ ID NO: 1574. In some embodiments, the single domain antibody provided herein comprises a CDR1 comprising an amino acid sequence of SEQ ID NO: 1575; a CDR2 comprising an amino acid sequence of SEQ ID NO: 1576; and a CDR3 comprising an amino acid sequence of SEQ ID NO: 1577. In some embodiments, the single domain antibody provided herein comprises a CDR1 comprising an amino acid sequence of SEQ ID NO: 1578; a CDR2 comprising an amino acid sequence of SEQ ID NO: 1579; and a CDR3 comprising an amino acid sequence of SEQ ID NO: 1580. In some embodiments, the single domain antibody provided herein comprises a CDR1 comprising an amino acid sequence of SEQ ID NO: 1581; a CDR2 comprising an amino acid sequence of SEQ ID NO: 1582; and a CDR3 comprising an amino acid sequence of SEQ ID NO: 1583. In some embodiments, the single domain antibody provided herein comprises a CDR1 comprising an amino acid sequence of SEQ ID NO: 1584; a CDR2 comprising an amino acid sequence of SEQ ID NO: 1585; and a CDR3 comprising an amino acid sequence of SEQ ID NO: 1586. In some embodiments, the single domain antibody provided herein comprises a CDR1 comprising an amino acid sequence of SEQ ID NO: 1587; a CDR2 comprising an amino acid sequence of SEQ ID NO: 1588; and a CDR3 comprising an amino acid sequence of SEQ ID NO: 1589. In some embodiments, the single domain antibody provided herein comprises a CDR1 comprising an amino acid sequence of SEQ ID NO: 1590; a CDR2 comprising an amino acid sequence of SEQ ID NO: 1591; and a CDR3 comprising an amino acid sequence of SEQ ID NO: 1592. In some embodiments, the single domain antibody provided herein comprises a CDR1 comprising an amino acid sequence of SEQ ID NO: 1593; a CDR2 comprising an amino acid sequence of SEQ ID NO: 1594; and a CDR3 comprising an amino acid sequence of SEQ ID NO: 1595. In some embodiments, the single domain antibody provided herein comprises a CDR1 comprising an amino acid sequence of SEQ ID NO: 1596; a CDR2 comprising an amino acid sequence of SEQ ID NO: 1597; and a CDR3 comprising an amino acid sequence of SEQ ID NO: 1598.

[0418] In some embodiments, the single domain antibody provided herein comprises a CDR1 comprising an amino acid sequence of SEQ ID NO: 1599; a CDR2 comprising an amino acid sequence of SEQ ID NO: 1600; and a CDR3 comprising an amino acid sequence of SEQ ID NO: 1601. In some embodiments, the single domain antibody provided herein comprises a CDR1 comprising an amino acid sequence of SEQ ID NO: 1602; a CDR2 comprising an amino acid sequence of SEQ ID NO: 1603; and a CDR3 comprising an amino acid sequence of SEQ ID NO: 1604. In some embodiments, the single domain antibody provided herein comprises a CDR1 comprising an amino acid sequence of SEQ ID NO: 1605; a CDR2 comprising an amino acid sequence of SEQ ID NO: 1606; and a CDR3 comprising an amino acid sequence of SEQ ID NO: 1607. In some embodiments, the single domain antibody provided herein comprises a CDR1 comprising an amino acid sequence of SEQ ID NO: 1608; a CDR2 comprising an amino acid sequence of SEQ ID NO: 1609; and a CDR3 comprising an amino acid sequence of SEQ ID NO: 1610. In some embodiments, the single domain antibody provided herein comprises a CDR1 comprising an amino acid sequence of SEQ ID NO: 1611; a CDR2 comprising an amino acid sequence of SEQ ID NO: 1612; and a CDR3 comprising an amino acid sequence of SEQ ID NO: 1613. In some embodiments, the single domain antibody provided herein comprises a CDR1 comprising an amino acid sequence of SEQ ID NO: 1614; a CDR2 comprising an amino acid sequence of SEQ ID NO: 1615; and a CDR3 comprising an amino acid sequence of SEQ ID NO: 1616.

[0419] In some embodiments, the single domain antibody provided herein comprises a CDR1 comprising an amino acid sequence of SEQ ID NO: 1617; a CDR2 comprising an amino acid sequence of SEQ ID NO: 1618; and a CDR3 comprising an amino acid sequence of SEQ ID NO: 1619. In some embodiments, the single domain antibody provided herein comprises a CDR1 comprising an amino acid sequence of SEQ ID NO: 1620; a CDR2 comprising an amino acid sequence of SEQ ID NO: 1621; and a CDR3 comprising an amino acid sequence of SEQ ID NO: 1622. In some embodiments, the single domain antibody provided herein comprises a CDR1 comprising an amino acid sequence of SEQ ID NO: 1623; a CDR2 comprising an amino acid sequence of SEQ ID NO: 1624; and a CDR3 comprising an amino acid sequence of SEQ ID NO: 1625. In some embodiments, the single domain antibody provided herein comprises a CDR1 comprising an amino acid sequence of SEQ ID NO: 1626; a CDR2 comprising an amino acid sequence of SEQ ID NO: 1627; and a CDR3 comprising an amino acid sequence of SEQ ID NO: 1628. In some embodiments, the single domain antibody provided herein comprises a CDR1 comprising an amino acid sequence of SEQ ID NO: 1629; a CDR2 comprising an amino acid sequence of SEQ ID NO: 1630; and a CDR3 comprising an amino acid sequence of SEQ ID NO: 1631. In some embodiments, the single domain antibody provided herein comprises a CDR1 comprising an amino acid sequence of SEQ ID NO: 1632; a CDR2 comprising an amino acid sequence of SEQ ID NO: 1633; and a CDR3 comprising an amino acid sequence of SEQ ID NO: 1634. In some embodiments, the single domain antibody provided herein comprises a CDR1 comprising an amino acid sequence of SEQ ID NO: 1635; a CDR2 comprising an amino acid sequence of SEQ ID NO: 1636; and a CDR3 comprising an amino acid sequence of SEQ ID NO: 1637. In some embodiments, the single domain antibody provided herein comprises a CDR1 comprising an amino acid sequence of SEQ ID NO: 1638; a CDR2 comprising an amino acid sequence of SEQ ID NO: 1639; and a CDR3 comprising an amino acid sequence of SEQ ID NO: 1640. In some embodiments, the single domain antibody provided herein comprises a CDR1 comprising an amino acid sequence of SEQ ID NO: 1641; a CDR2 comprising an amino acid sequence of SEQ ID NO: 1642; and a CDR3 comprising an amino acid sequence of SEQ ID NO: 1643. In some embodiments, the single domain antibody provided herein comprises a CDR1 comprising an amino acid sequence of SEQ ID NO: 1644; a CDR2 comprising an amino acid sequence of SEQ ID NO: 1645; and a CDR3 comprising an amino acid sequence of SEQ ID NO: 1646. In some embodiments, the single domain antibody provided herein comprises a CDR1 comprising an amino acid sequence of SEQ ID NO: 1647; a CDR2 comprising an amino acid sequence of SEQ ID NO: 1648; and a CDR3 comprising an amino acid sequence of SEQ ID NO: 1649. In some embodiments, the single domain antibody provided herein comprises a CDR1 comprising an amino acid sequence of SEQ ID NO: 1650; a CDR2 comprising an amino acid sequence of SEQ ID NO: 1651; and a CDR3 comprising an amino acid sequence of SEQ ID NO: 1652. In some embodiments, the single domain antibody provided herein comprises a CDR1 comprising an amino acid sequence of SEQ ID NO: 1653; a CDR2 comprising an amino acid sequence of SEQ ID NO: 1654; and a CDR3 comprising an amino acid sequence of SEQ ID NO: 1655. In some embodiments, the single domain antibody provided herein comprises a CDR1 comprising an amino acid sequence of SEQ ID NO: 1656; a CDR2 comprising an amino acid sequence of SEQ ID NO: 1657; and a CDR3 comprising an amino acid sequence of SEQ ID NO: 1658. In some embodiments, the single domain antibody provided herein comprises a CDR1 comprising an amino acid sequence of SEQ ID NO: 1659; a CDR2 comprising an amino acid sequence of SEQ ID NO: 1660; and a CDR3 comprising an amino acid sequence of SEQ ID NO: 1661. In some embodiments, the single domain antibody provided herein comprises a CDR1 comprising an amino acid sequence of SEQ ID NO: 1662; a CDR2 comprising an amino acid sequence of SEQ ID NO: 1663; and a CDR3 comprising an amino acid sequence of SEQ ID NO: 1664. In some embodiments, the single domain antibody provided herein comprises a CDR1 comprising an amino acid sequence of SEQ ID NO: 1665; a CDR2 comprising an amino acid sequence of SEQ ID NO: 1666; and a CDR3 comprising an amino acid sequence of SEQ ID NO: 1667. In some embodiments, the single domain antibody provided herein comprises a CDR1 comprising an amino acid sequence of SEQ ID NO: 1668; a CDR2 comprising an amino acid sequence of SEQ ID NO: 1669; and a CDR3 comprising an amino acid sequence of SEQ ID NO: 1670. In some embodiments, the single domain antibody provided herein comprises a CDR1 comprising an amino acid sequence of SEQ ID NO: 1671; a CDR2 comprising an amino acid sequence of SEQ ID NO: 1672; and a CDR3 comprising an amino acid sequence of SEQ ID NO: 1673. In some embodiments, the single domain antibody provided herein comprises a CDR1 comprising an amino acid sequence of SEQ ID NO: 1674; a CDR2 comprising an amino acid sequence of SEQ ID NO: 1675; and a CDR3 comprising an amino acid sequence of SEQ ID NO: 1676. In some embodiments, the single domain antibody provided herein comprises a CDR1 comprising an amino acid sequence of SEQ ID NO: 1677; a CDR2 comprising an amino acid sequence of SEQ ID NO: 1678; and a CDR3 comprising an amino acid sequence of SEQ ID NO: 1679. In some embodiments, the single domain antibody provided herein comprises a CDR1 comprising an amino acid sequence of SEQ ID NO: 1680; a CDR2 comprising an amino acid sequence of SEQ ID NO: 1681; and a CDR3 comprising an amino acid sequence of SEQ ID NO: 1682. In some embodiments, the single domain antibody provided herein comprises a CDR1 comprising an amino acid sequence of SEQ ID NO: 1683; a CDR2 comprising an amino acid sequence of SEQ ID NO: 1684; and a CDR3 comprising an amino acid sequence of SEQ ID NO: 1685. In some embodiments, the single domain antibody provided herein comprises a CDR1 comprising an amino acid sequence of SEQ ID NO: 1686; a CDR2 comprising an amino acid sequence of SEQ ID NO: 1687; and a CDR3 comprising an amino acid sequence of SEQ ID NO: 1688. In some embodiments, the single domain antibody provided herein comprises a CDR1 comprising an amino acid sequence of SEQ ID NO: 1689; a CDR2 comprising an amino acid sequence of SEQ ID NO: 1690; and a CDR3 comprising an amino acid sequence of SEQ ID NO: 1691. In some embodiments, the single domain antibody provided herein comprises a CDR1 comprising an amino acid sequence of SEQ ID NO: 1692; a CDR2 comprising an amino acid sequence of SEQ ID NO: 1693; and a CDR3 comprising an amino acid sequence of SEQ ID NO: 1694. In some embodiments, the single domain antibody provided herein comprises a CDR1 comprising an amino acid sequence of SEQ ID NO: 1695; a CDR2 comprising an amino acid sequence of SEQ ID NO: 1696; and a CDR3 comprising an amino acid sequence of SEQ ID NO: 1697. In some embodiments, the single domain antibody provided herein comprises a CDR1 comprising an amino acid sequence of SEQ ID NO: 1698; a CDR2 comprising an amino acid sequence of SEQ ID NO: 1699; and a CDR3 comprising an amino acid sequence of SEQ ID NO: 1700. In some embodiments, the single domain antibody provided herein comprises a CDR1 comprising an amino acid sequence of SEQ ID NO: 1701; a CDR2 comprising an amino acid sequence of SEQ ID NO: 1702; and a CDR3 comprising an amino acid sequence of SEQ ID NO: 1703. In some embodiments, the single domain antibody provided herein comprises a CDR1 comprising an amino acid sequence of SEQ ID NO: 1704; a CDR2 comprising an amino acid sequence of SEQ ID NO: 1705; and a CDR3 comprising an amino acid sequence of SEQ ID NO: 1706. In some embodiments, the single domain antibody provided herein comprises a CDR1 comprising an amino acid sequence of SEQ ID NO: 1707; a CDR2 comprising an amino acid sequence of SEQ ID NO: 1708; and a CDR3 comprising an amino acid sequence of SEQ ID NO: 1709. In some embodiments, the single domain antibody provided herein comprises a CDR1 comprising an amino acid sequence of SEQ ID NO: 1710; a CDR2 comprising an amino acid sequence of SEQ ID NO: 1711; and a CDR3 comprising an amino acid sequence of SEQ ID NO: 1712. In some embodiments, the single domain antibody provided herein comprises a CDR1 comprising an amino acid sequence of SEQ ID NO: 1713; a CDR2 comprising an amino acid sequence of SEQ ID NO: 1714; and a CDR3 comprising an amino acid sequence of SEQ ID NO: 1715. In some embodiments, the single domain antibody provided herein comprises a CDR1 comprising an amino acid sequence of SEQ ID NO: 1716; a CDR2 comprising an amino acid sequence of SEQ ID NO: 1717; and a CDR3 comprising an amino acid sequence of SEQ ID NO: 1718. In some embodiments, the single domain antibody provided herein comprises a CDR1 comprising an amino acid sequence of SEQ ID NO: 1719; a CDR2 comprising an amino acid sequence of SEQ ID NO: 1720; and a CDR3 comprising an amino acid sequence of SEQ ID NO: 1721. In some embodiments, the single domain antibody provided herein comprises a CDR1 comprising an amino acid sequence of SEQ ID NO: 1722; a CDR2 comprising an amino acid sequence of SEQ ID NO: 1723; and a CDR3 comprising an amino acid sequence of SEQ ID NO: 1724. In some embodiments, the single domain antibody provided herein comprises a CDR1 comprising an amino acid sequence of SEQ ID NO: 1725; a CDR2 comprising an amino acid sequence of SEQ ID NO: 1726; and a CDR3 comprising an amino acid sequence of SEQ ID NO: 1727. In some embodiments, the single domain antibody provided herein comprises a CDR1 comprising an amino acid sequence of SEQ ID NO: 1728; a CDR2 comprising an amino acid sequence of SEQ ID NO: 1729; and a CDR3 comprising an amino acid sequence of SEQ ID NO: 1730. In some embodiments, the single domain antibody provided herein comprises a CDR1 comprising an amino acid sequence of SEQ ID NO: 1731; a CDR2 comprising an amino acid sequence of SEQ ID NO: 1732; and a CDR3 comprising an amino acid sequence of SEQ ID NO: 1733. In some embodiments, the single domain antibody provided herein comprises a CDR1 comprising an amino acid sequence of SEQ ID NO: 1734; a CDR2 comprising an amino acid sequence of SEQ ID NO: 1735; and a CDR3 comprising an amino acid sequence of SEQ ID NO: 1736. In some embodiments, the single domain antibody provided herein comprises a CDR1 comprising an amino acid sequence of SEQ ID NO: 1737; a CDR2 comprising an amino acid sequence of SEQ ID NO: 1738; and a CDR3 comprising an amino acid sequence of SEQ ID NO: 1739. In some embodiments, the single domain antibody provided herein comprises a CDR1 comprising an amino acid sequence of SEQ ID NO: 1740; a CDR2 comprising an amino acid sequence of SEQ ID NO: 1741; and a CDR3 comprising an amino acid sequence of SEQ ID NO: 1742. In some embodiments, the single domain antibody provided herein comprises a CDR1 comprising an amino acid sequence of SEQ ID NO: 1743; a CDR2 comprising an amino acid sequence of SEQ ID NO: 1744; and a CDR3 comprising an amino acid sequence of SEQ ID NO: 1745. In some embodiments, the single domain antibody provided herein comprises a CDR1 comprising an amino acid sequence of SEQ ID NO: 1746; a CDR2 comprising an amino acid sequence of SEQ ID NO: 1747; and a CDR3 comprising an amino acid sequence of SEQ ID NO: 1748. In some embodiments, the single domain antibody provided herein comprises a CDR1 comprising an amino acid sequence of SEQ ID NO: 1749; a CDR2 comprising an amino acid sequence of SEQ ID NO: 1750; and a CDR3 comprising an amino acid sequence of SEQ ID NO: 1751. In some embodiments, the single domain antibody provided herein comprises a CDR1 comprising an amino acid sequence of SEQ ID NO: 1752; a CDR2 comprising an amino acid sequence of SEQ ID NO: 1753; and a CDR3 comprising an amino acid sequence of SEQ ID NO: 1754. In some embodiments, the single domain antibody provided herein comprises a CDR1 comprising an amino acid sequence of SEQ ID NO: 1755; a CDR2 comprising an amino acid sequence of SEQ ID NO: 1756; and a CDR3 comprising an amino acid sequence of SEQ ID NO: 1757. In some embodiments, the single domain antibody provided herein comprises a CDR1 comprising an amino acid sequence of SEQ ID NO: 1758; a CDR2 comprising an amino acid sequence of SEQ ID NO: 1759; and a CDR3 comprising an amino acid sequence of SEQ ID NO: 1760. In some embodiments, the single domain antibody provided herein comprises a CDR1 comprising an amino acid sequence of SEQ ID NO: 1761; a CDR2 comprising an amino acid sequence of SEQ ID NO: 1762; and a CDR3 comprising an amino acid sequence of SEQ ID NO: 1763. In some embodiments, the single domain antibody provided herein comprises a CDR1 comprising an amino acid sequence of SEQ ID NO: 1764; a CDR2 comprising an amino acid sequence of SEQ ID NO: 1765; and a CDR3 comprising an amino acid sequence of SEQ ID NO: 1766. In some embodiments, the single domain antibody provided herein comprises a CDR1 comprising an amino acid sequence of SEQ ID NO: 1767; a CDR2 comprising an amino acid sequence of SEQ ID NO: 1768; and a CDR3 comprising an amino acid sequence of SEQ ID NO: 1769. In some embodiments, the single domain antibody provided herein comprises a CDR1 comprising an amino acid sequence of SEQ ID NO: 1770; a CDR2 comprising an amino acid sequence of SEQ ID NO: 1771; and a CDR3 comprising an amino acid sequence of SEQ ID NO: 1772. In some embodiments, the single domain antibody provided herein comprises a CDR1 comprising an amino acid sequence of SEQ ID NO: 1773; a CDR2 comprising an amino acid sequence of SEQ ID NO: 1774; and a CDR3 comprising an amino acid sequence of SEQ ID NO: 1775. In some embodiments, the single domain antibody provided herein comprises a CDR1 comprising an amino acid sequence of SEQ ID NO: 1776; a CDR2 comprising an amino acid sequence of SEQ ID NO: 1777; and a CDR3 comprising an amino acid sequence of SEQ ID NO: 1778. In some embodiments, the single domain antibody provided herein comprises a CDR1 comprising an amino acid sequence of SEQ ID NO: 1779; a CDR2 comprising an amino acid sequence of SEQ ID NO: 1780; and a CDR3 comprising an amino acid sequence of SEQ ID NO: 1781. In some embodiments, the single domain antibody provided herein comprises a CDR1 comprising an amino acid sequence of SEQ ID NO: 1782; a CDR2 comprising an amino acid sequence of SEQ ID NO: 1783; and a CDR3 comprising an amino acid sequence of SEQ ID NO: 1784. In some embodiments, the single domain antibody provided herein comprises a CDR1 comprising an amino acid sequence of SEQ ID NO: 1785; a CDR2 comprising an amino acid sequence of SEQ ID NO: 1786; and a CDR3 comprising an amino acid sequence of SEQ ID NO: 1787. In some embodiments, the single domain antibody provided herein comprises a CDR1 comprising an amino acid sequence of SEQ ID NO: 1788; a CDR2 comprising an amino acid sequence of SEQ ID NO: 1789; and a CDR3 comprising an amino acid sequence of SEQ ID NO: 1790. In some embodiments, the single domain antibody provided herein comprises a CDR1 comprising an amino acid sequence of SEQ ID NO: 1791; a CDR2 comprising an amino acid sequence of SEQ ID NO: 1792; and a CDR3 comprising an amino acid sequence of SEQ ID NO: 1793. In some embodiments, the single domain antibody provided herein comprises a CDR1 comprising an amino acid sequence of SEQ ID NO: 1794; a CDR2 comprising an amino acid sequence of SEQ ID NO: 1795; and a CDR3 comprising an amino acid sequence of SEQ ID NO: 1796. In some embodiments, the single domain antibody provided herein comprises a CDR1 comprising an amino acid sequence of SEQ ID NO: 1797; a CDR2 comprising an amino acid sequence of SEQ ID NO: 1798; and a CDR3 comprising an amino acid sequence of SEQ ID NO: 1799. In some embodiments, the single domain antibody provided herein comprises a CDR1 comprising an amino acid sequence of SEQ ID NO: 1800; a CDR2 comprising an amino acid sequence of SEQ ID NO: 1801; and a CDR3 comprising an amino acid sequence of SEQ ID NO: 1802. In some embodiments, the single domain antibody provided herein comprises a CDR1 comprising an amino acid sequence of SEQ ID NO: 1803; a CDR2 comprising an amino acid sequence of SEQ ID NO: 1804; and a CDR3 comprising an amino acid sequence of SEQ ID NO: 1805. In some embodiments, the single domain antibody provided herein comprises a CDR1 comprising an amino acid sequence of SEQ ID NO: 1806; a CDR2 comprising an amino acid sequence of SEQ ID NO: 1807; and a CDR3 comprising an amino acid sequence of SEQ ID NO: 1808. In some embodiments, the single domain antibody provided herein comprises a CDR1 comprising an amino acid sequence of SEQ ID NO: 1809; a CDR2 comprising an amino acid sequence of SEQ ID NO: 1810; and a CDR3 comprising an amino acid sequence of SEQ ID NO: 1811. In some embodiments, the single domain antibody provided herein comprises a CDR1 comprising an amino acid sequence of SEQ ID NO: 1812; a CDR2 comprising an amino acid sequence of SEQ ID NO: 1813; and a CDR3 comprising an amino acid sequence of SEQ ID NO: 1814. In some embodiments, the single domain antibody provided herein comprises a CDR1 comprising an amino acid sequence of SEQ ID NO: 1815; a CDR2 comprising an amino acid sequence of SEQ ID NO: 1816; and a CDR3 comprising an amino acid sequence of SEQ ID NO: 1817. In some embodiments, the single domain antibody provided herein comprises a CDR1 comprising an amino acid sequence of SEQ ID NO: 1818; a CDR2 comprising an amino acid sequence of SEQ ID NO: 1819; and a CDR3 comprising an amino acid sequence of SEQ ID NO: 1820. In some embodiments, the single domain antibody provided herein comprises a CDR1 comprising an amino acid sequence of SEQ ID NO: 1821; a CDR2 comprising an amino acid sequence of SEQ ID NO: 1822; and a CDR3 comprising an amino acid sequence of SEQ ID NO: 1823. In some embodiments, the single domain antibody provided herein comprises a CDR1 comprising an amino acid sequence of SEQ ID NO: 1824; a CDR2 comprising an amino acid sequence of SEQ ID NO: 1825; and a CDR3 comprising an amino acid sequence of SEQ ID NO: 1826. In some embodiments, the single domain antibody provided herein comprises a CDR1 comprising an amino acid sequence of SEQ ID NO: 1827; a CDR2 comprising an amino acid sequence of SEQ ID NO: 1828; and a CDR3 comprising an amino acid sequence of SEQ ID NO: 1829. In some embodiments, the single domain antibody provided herein comprises a CDR1 comprising an amino acid sequence of SEQ ID NO: 1830; a CDR2 comprising an amino acid sequence of SEQ ID NO: 1831; and a CDR3 comprising an amino acid sequence of SEQ ID NO: 1832. In some embodiments, the single domain antibody provided herein comprises a CDR1 comprising an amino acid sequence of SEQ ID NO: 1833; a CDR2 comprising an amino acid sequence of SEQ ID NO: 1834; and a CDR3 comprising an amino acid sequence of SEQ ID NO: 1835. In some embodiments, the single domain antibody provided herein comprises a CDR1 comprising an amino acid sequence of SEQ ID NO: 1836; a CDR2 comprising an amino acid sequence of SEQ ID NO: 1837; and a CDR3 comprising an amino acid sequence of SEQ ID NO: 1838. In some embodiments, the single domain antibody provided herein comprises a CDR1 comprising an amino acid sequence of SEQ ID NO: 1839; a CDR2 comprising an amino acid sequence of SEQ ID NO: 1840; and a CDR3 comprising an amino acid sequence of SEQ ID NO: 1841. In some embodiments, the single domain antibody provided herein comprises a CDR1 comprising an amino acid sequence of SEQ ID NO: 1842; a CDR2 comprising an amino acid sequence of SEQ ID NO: 1843; and a CDR3 comprising an amino acid sequence of SEQ ID NO: 1844. In some embodiments, the single domain antibody provided herein comprises a CDR1 comprising an amino acid sequence of SEQ ID NO: 1845; a CDR2 comprising an amino acid sequence of SEQ ID NO: 1846; and a CDR3 comprising an amino acid sequence of SEQ ID NO: 1847. In some embodiments, the single domain antibody provided herein comprises a CDR1 comprising an amino acid sequence of SEQ ID NO: 1848; a CDR2 comprising an amino acid sequence of SEQ ID NO: 1849; and a CDR3 comprising an amino acid sequence of SEQ ID NO: 1850. In some embodiments, the single domain antibody provided herein comprises a CDR1 comprising an amino acid sequence of SEQ ID NO: 1851; a CDR2 comprising an amino acid sequence of SEQ ID NO: 1852; and a CDR3 comprising an amino acid sequence of SEQ ID NO: 1853. In some embodiments, the single domain antibody provided herein comprises a CDR1 comprising an amino acid sequence of SEQ ID NO: 1854; a CDR2 comprising an amino acid sequence of SEQ ID NO: 1855; and a CDR3 comprising an amino acid sequence of SEQ ID NO: 1856. In some embodiments, the single domain antibody provided herein comprises a CDR1 comprising an amino acid sequence of SEQ ID NO: 1857; a CDR2 comprising an amino acid sequence of SEQ ID NO: 1858; and a CDR3 comprising an amino acid sequence of SEQ ID NO: 1859. In some embodiments, the single domain antibody provided herein comprises a CDR1 comprising an amino acid sequence of SEQ ID NO: 1860; a CDR2 comprising an amino acid sequence of SEQ ID NO: 1861; and a CDR3 comprising an amino acid sequence of SEQ ID NO: 1862. In some embodiments, the single domain antibody provided herein comprises a CDR1 comprising an amino acid sequence of SEQ ID NO: 1863; a CDR2 comprising an amino acid sequence of SEQ ID NO: 1864; and a CDR3 comprising an amino acid sequence of SEQ ID NO: 1865. In some embodiments, the single domain antibody provided herein comprises a CDR1 comprising an amino acid sequence of SEQ ID NO: 1866; a CDR2 comprising an amino acid sequence of SEQ ID NO: 1867; and a CDR3 comprising an amino acid sequence of SEQ ID NO: 1868. In some embodiments, the single domain antibody provided herein comprises a CDR1 comprising an amino acid sequence of SEQ ID NO: 1869; a CDR2 comprising an amino acid sequence of SEQ ID NO: 1870; and a CDR3 comprising an amino acid sequence of SEQ ID NO: 1871. In some embodiments, the single domain antibody provided herein comprises a CDR1 comprising an amino acid sequence of SEQ ID NO: 1872; a CDR2 comprising an amino acid sequence of SEQ ID NO: 1873; and a CDR3 comprising an amino acid sequence of SEQ ID NO: 1874. In some embodiments, the single domain antibody provided herein comprises a CDR1 comprising an amino acid sequence of SEQ ID NO: 1875; a CDR2 comprising an amino acid sequence of SEQ ID NO: 1876; and a CDR3 comprising an amino acid sequence of SEQ ID NO: 1877. In some embodiments, the single domain antibody provided herein comprises a CDR1 comprising an amino acid sequence of SEQ ID NO: 1878; a CDR2 comprising an amino acid sequence of SEQ ID NO: 1879; and a CDR3 comprising an amino acid sequence of SEQ ID NO: 1880. In some embodiments, the single domain antibody provided herein comprises a CDR1 comprising an amino acid sequence of SEQ ID NO: 1881; a CDR2 comprising an amino acid sequence of SEQ ID NO: 1882; and a CDR3 comprising an amino acid sequence of SEQ ID NO: 1883. In some embodiments, the single domain antibody provided herein comprises a CDR1 comprising an amino acid sequence of SEQ ID NO: 1884; a CDR2 comprising an amino acid sequence of SEQ ID NO: 1885; and a CDR3 comprising an amino acid sequence of SEQ ID NO: 1886. In some embodiments, the single domain antibody provided herein comprises a CDR1 comprising an amino acid sequence of SEQ ID NO: 1887; a CDR2 comprising an amino acid sequence of SEQ ID NO: 1888; and a CDR3 comprising an amino acid sequence of SEQ ID NO: 1889. In some embodiments, the single domain antibody provided herein comprises a CDR1 comprising an amino acid sequence of SEQ ID NO: 1890; a CDR2 comprising an amino acid sequence of SEQ ID NO: 1891; and a CDR3 comprising an amino acid sequence of SEQ ID NO: 1892. In some embodiments, the single domain antibody provided herein comprises a CDR1 comprising an amino acid sequence of SEQ ID NO: 1893; a CDR2 comprising an amino acid sequence of SEQ ID NO: 1894; and a CDR3 comprising an amino acid sequence of SEQ ID NO: 1895. In some embodiments, the single domain antibody provided herein comprises a CDR1 comprising an amino acid sequence of SEQ ID NO: 1896; a CDR2 comprising an amino acid sequence of SEQ ID NO: 1897; and a CDR3 comprising an amino acid sequence of SEQ ID NO: 1898. In some embodiments, the single domain antibody provided herein comprises a CDR1 comprising an amino acid sequence of SEQ ID NO: 1899; a CDR2 comprising an amino acid sequence of SEQ ID NO: 1900; and a CDR3 comprising an amino acid sequence of SEQ ID NO: 1901. In some embodiments, the single domain antibody provided herein comprises a CDR1 comprising an amino acid sequence of SEQ ID NO: 1902; a CDR2 comprising an amino acid sequence of SEQ ID NO: 1903; and a CDR3 comprising an amino acid sequence of SEQ ID NO: 1904. In some embodiments, the single domain antibody provided herein comprises a CDR1 comprising an amino acid sequence of SEQ ID NO: 1905; a CDR2 comprising an amino acid sequence of SEQ ID NO: 1906; and a CDR3 comprising an amino acid sequence of SEQ ID NO: 1907. In some embodiments, the single domain antibody provided herein comprises a CDR1 comprising an amino acid sequence of SEQ ID NO: 1908; a CDR2 comprising an amino acid sequence of SEQ ID NO: 1909; and a CDR3 comprising an amino acid sequence of SEQ ID NO: 1910. In some embodiments, the single domain antibody provided herein comprises a CDR1 comprising an amino acid sequence of SEQ ID NO: 1911; a CDR2 comprising an amino acid sequence of SEQ ID NO: 1912; and a CDR3 comprising an amino acid sequence of SEQ ID NO: 1913. In some embodiments, the single domain antibody provided herein comprises a CDR1 comprising an amino acid sequence of SEQ ID NO: 1914; a CDR2 comprising an amino acid sequence of SEQ ID NO: 1915; and a CDR3 comprising an amino acid sequence of SEQ ID NO: 1916. In some embodiments, the single domain antibody provided herein comprises a CDR1 comprising an amino acid sequence of SEQ ID NO: 1917; a CDR2 comprising an amino acid sequence of SEQ ID NO: 1918; and a CDR3 comprising an amino acid sequence of SEQ ID NO: 1919. In some embodiments, the single domain antibody provided herein comprises a CDR1 comprising an amino acid sequence of SEQ ID NO: 1920; a CDR2 comprising an amino acid sequence of SEQ ID NO: 1921; and a CDR3 comprising an amino acid sequence of SEQ ID NO: 1922. In some embodiments, the single domain antibody provided herein comprises a CDR1 comprising an amino acid sequence of SEQ ID NO: 1923; a CDR2 comprising an amino acid sequence of SEQ ID NO: 1924; and a CDR3 comprising an amino acid sequence of SEQ ID NO: 1925. In some embodiments, the single domain antibody provided herein comprises a CDR1 comprising an amino acid sequence of SEQ ID NO: 1926; a CDR2 comprising an amino acid sequence of SEQ ID NO: 1927; and a CDR3 comprising an amino acid sequence of SEQ ID NO: 1928. In some embodiments, the single domain antibody provided herein comprises a CDR1 comprising an amino acid sequence of SEQ ID NO: 1929; a CDR2 comprising an amino acid sequence of SEQ ID NO: 1930; and a CDR3 comprising an amino acid sequence of SEQ ID NO: 1931. In some embodiments, the single domain antibody provided herein comprises a CDR1 comprising an amino acid sequence of SEQ ID NO: 1932; a CDR2 comprising an amino acid sequence of SEQ ID NO: 1933; and a CDR3 comprising an amino acid sequence of SEQ ID NO: 1934. In some embodiments, the single domain antibody provided herein comprises a CDR1 comprising an amino acid sequence of SEQ ID NO: 1935; a CDR2 comprising an amino acid sequence of SEQ ID NO: 1936; and a CDR3 comprising an amino acid sequence of SEQ ID NO: 1937. In some embodiments, the single domain antibody provided herein comprises a CDR1 comprising an amino acid sequence of SEQ ID NO: 1938; a CDR2 comprising an amino acid sequence of SEQ ID NO: 1939; and a CDR3 comprising an amino acid sequence of SEQ ID NO: 1940. In some embodiments, the single domain antibody provided herein comprises a CDR1 comprising an amino acid sequence of SEQ ID NO: 1941; a CDR2 comprising an amino acid sequence of SEQ ID NO: 1942; and a CDR3 comprising an amino acid sequence of SEQ ID NO: 1943. In some embodiments, the single domain antibody provided herein comprises a CDR1 comprising an amino acid sequence of SEQ ID NO: 1944; a CDR2 comprising an amino acid sequence of SEQ ID NO: 1945; and a CDR3 comprising an amino acid sequence of SEQ ID NO: 1946. In some embodiments, the single domain antibody provided herein comprises a CDR1 comprising an amino acid sequence of SEQ ID NO: 1947; a CDR2 comprising an amino acid sequence of SEQ ID NO: 1948; and a CDR3 comprising an amino acid sequence of SEQ ID NO: 1949. In some embodiments, the single domain antibody provided herein comprises a CDR1 comprising an amino acid sequence of SEQ ID NO: 1950; a CDR2 comprising an amino acid sequence of SEQ ID NO: 1951; and a CDR3 comprising an amino acid sequence of SEQ ID NO: 1952.

[0420] In some embodiments, the single domain antibody further comprises one or more framework regions of SEQ ID NOs: 1 to 122. In some embodiments, the single domain antibody comprises one or more framework(s) derived from a VHH domain comprising the sequence of SEQ ID NO: 1. In some embodiments, the single domain antibody comprises one or more framework(s) derived from a VHH domain comprising the sequence of SEQ ID NO: 2. In some embodiments, the single domain antibody comprises one or more framework(s) derived from a VHH domain comprising the sequence of SEQ ID NO: 3. In some embodiments, the single domain antibody comprises one or more framework(s) derived from a VHH domain comprising the sequence of SEQ ID NO: 4. In some embodiments, the single domain antibody comprises one or more framework(s) derived from a VHH domain comprising the sequence of SEQ ID NO: 5. In some embodiments, the single domain antibody comprises one or more framework(s) derived from a VHH domain comprising the sequence of SEQ ID NO: 6. In some embodiments, the single domain antibody comprises one or more framework(s) derived from a VHH domain comprising the sequence of SEQ ID NO: 7. In some embodiments, the single domain antibody comprises one or more framework(s) derived from a VHH domain comprising the sequence of SEQ ID NO: 8. In some embodiments, the single domain antibody comprises one or more framework(s) derived from a VHH domain comprising the sequence of SEQ ID NO: 9. In some embodiments, the single domain antibody comprises one or more framework(s) derived from a VHH domain comprising the sequence of SEQ ID NO: 10. In some embodiments, the single domain antibody comprises one or more framework(s) derived from a VHH domain comprising the sequence of SEQ ID NO: 11. In some embodiments, the single domain antibody comprises one or more framework(s) derived from a VHH domain comprising the sequence of SEQ ID NO: 12. In some embodiments, the single domain antibody comprises one or more framework(s) derived from a VHH domain comprising the sequence of SEQ ID NO: 13. In some embodiments, the single domain antibody comprises one or more framework(s) derived from a VHH domain comprising the sequence of SEQ ID NO: 14. In some embodiments, the single domain antibody comprises one or more framework(s) derived from a VHH domain comprising the sequence of SEQ ID NO: 15. In some embodiments, the single domain antibody comprises one or more framework(s) derived from a VHH domain comprising the sequence of SEQ ID NO: 16. In some embodiments, the single domain antibody comprises one or more framework(s) derived from a VHH domain comprising the sequence of SEQ ID NO: 17. In some embodiments, the single domain antibody comprises one or more framework(s) derived from a VHH domain comprising the sequence of SEQ ID NO: 18. In some embodiments, the single domain antibody comprises one or more framework(s) derived from a VHH domain comprising the sequence of SEQ ID NO: 19. In some embodiments, the single domain antibody comprises one or more framework(s) derived from a VHH domain comprising the sequence of SEQ ID NO: 20. In some embodiments, the single domain antibody comprises one or more framework(s) derived from a VHH domain comprising the sequence of SEQ ID NO: 21. In some embodiments, the single domain antibody comprises one or more framework(s) derived from a VHH domain comprising the sequence of SEQ ID NO: 22. In some embodiments, the single domain antibody comprises one or more framework(s) derived from a VHH domain comprising the sequence of SEQ ID NO: 23. In some embodiments, the single domain antibody comprises one or more framework(s) derived from a VHH domain comprising the sequence of SEQ ID NO: 24. In some embodiments, the single domain antibody comprises one or more framework(s) derived from a VHH domain comprising the sequence of SEQ ID NO: 25. In some embodiments, the single domain antibody comprises one or more framework(s) derived from a VHH domain comprising the sequence of SEQ ID NO: 26. In some embodiments, the single domain antibody comprises one or more framework(s) derived from a VHH domain comprising the sequence of SEQ ID NO: 27. In some embodiments, the single domain antibody comprises one or more framework(s) derived from a VHH domain comprising the sequence of SEQ ID NO: 28. In some embodiments, the single domain antibody comprises one or more framework(s) derived from a VHH domain comprising the sequence of SEQ ID NO: 29. In some embodiments, the single domain antibody comprises one or more framework(s) derived from a VHH domain comprising the sequence of SEQ ID NO: 30. In some embodiments, the single domain antibody comprises one or more framework(s) derived from a VHH domain comprising the sequence of SEQ ID NO: 31. In some embodiments, the single domain antibody comprises one or more framework(s) derived from a VHH domain comprising the sequence of SEQ ID NO: 32. In some embodiments, the single domain antibody comprises one or more framework(s) derived from a VHH domain comprising the sequence of SEQ ID NO: 33. In some embodiments, the single domain antibody comprises one or more framework(s) derived from a VHH domain comprising the sequence of SEQ ID NO: 34. In some embodiments, the single domain antibody comprises one or more framework(s) derived from a VHH domain comprising the sequence of SEQ ID NO: 35. In some embodiments, the single domain antibody comprises one or more framework(s) derived from a VHH domain comprising the sequence of SEQ ID NO: 36. In some embodiments, the single domain antibody comprises one or more framework(s) derived from a VHH domain comprising the sequence of SEQ ID NO: 37. In some embodiments, the single domain antibody comprises one or more framework(s) derived from a VHH domain comprising the sequence of SEQ ID NO: 38. In some embodiments, the single domain antibody comprises one or more framework(s) derived from a VHH domain comprising the sequence of SEQ ID NO: 39. In some embodiments, the single domain antibody comprises one or more framework(s) derived from a VHH domain comprising the sequence of SEQ ID NO: 40. In some embodiments, the single domain antibody comprises one or more framework(s) derived from a VHH domain comprising the sequence of SEQ ID NO: 41. In some embodiments, the single domain antibody comprises one or more framework(s) derived from a VHH domain comprising the sequence of SEQ ID NO: 42. In some embodiments, the single domain antibody comprises one or more framework(s) derived from a VHH domain comprising the sequence of SEQ ID NO: 43. In some embodiments, the single domain antibody comprises one or more framework(s) derived from a VHH domain comprising the sequence of SEQ ID NO: 44. In some embodiments, the single domain antibody comprises one or more framework(s) derived from a VHH domain comprising the sequence of SEQ ID NO: 45. In some embodiments, the single domain antibody comprises one or more framework(s) derived from a VHH domain comprising the sequence of SEQ ID NO: 46. In some embodiments, the single domain antibody comprises one or more framework(s) derived from a VHH domain comprising the sequence of SEQ ID NO: 47. In some embodiments, the single domain antibody comprises one or more framework(s) derived from a VHH domain comprising the sequence of SEQ ID NO: 48. In some embodiments, the single domain antibody comprises one or more framework(s) derived from a VHH domain comprising the sequence of SEQ ID NO: 49. In some embodiments, the single domain antibody comprises one or more framework(s) derived from a VHH domain comprising the sequence of SEQ ID NO: 50. In some embodiments, the single domain antibody comprises one or more framework(s) derived from a VHH domain comprising the sequence of SEQ ID NO: 51. In some embodiments, the single domain antibody comprises one or more framework(s) derived from a VHH domain comprising the sequence of SEQ ID NO: 52. In some embodiments, the single domain antibody comprises one or more framework(s) derived from a VHH domain comprising the sequence of SEQ ID NO: 53. In some embodiments, the single domain antibody comprises one or more framework(s) derived from a VHH domain comprising the sequence of SEQ ID NO: 54. In some embodiments, the single domain antibody comprises one or more framework(s) derived from a VHH domain comprising the sequence of SEQ ID NO: 55. In some embodiments, the single domain antibody comprises one or more framework(s) derived from a VHH domain comprising the sequence of SEQ ID NO: 56. In some embodiments, the single domain antibody comprises one or more framework(s) derived from a VHH domain comprising the sequence of SEQ ID NO: 57. In some embodiments, the single domain antibody comprises one or more framework(s) derived from a VHH domain comprising the sequence of SEQ ID NO: 58. In some embodiments, the single domain antibody comprises one or more framework(s) derived from a VHH domain comprising the sequence of SEQ ID NO: 59. In some embodiments, the single domain antibody comprises one or more framework(s) derived from a VHH domain comprising the sequence of SEQ ID NO: 60. In some embodiments, the single domain antibody comprises one or more framework(s) derived from a VHH domain comprising the sequence of SEQ ID NO: 61. In some embodiments, the single domain antibody comprises one or more framework(s) derived from a VHH domain comprising the sequence of SEQ ID NO: 62. In some embodiments, the single domain antibody comprises one or more framework(s) derived from a VHH domain comprising the sequence of SEQ ID NO: 63. In some embodiments, the single domain antibody comprises one or more framework(s) derived from a VHH domain comprising the sequence of SEQ ID NO: 64. In some embodiments, the single domain antibody comprises one or more framework(s) derived from a VHH domain comprising the sequence of SEQ ID NO: 65. In some embodiments, the single domain antibody comprises one or more framework(s) derived from a VHH domain comprising the sequence of SEQ ID NO: 66. In some embodiments, the single domain antibody comprises one or more framework(s) derived from a VHH domain comprising the sequence of SEQ ID NO: 67. In some embodiments, the single domain antibody comprises one or more framework(s) derived from a VHH domain comprising the sequence of SEQ ID NO: 68. In some embodiments, the single domain antibody comprises one or more framework(s) derived from a VHH domain comprising the sequence of SEQ ID NO: 69. In some embodiments, the single domain antibody comprises one or more framework(s) derived from a VHH domain comprising the sequence of SEQ ID NO: 70. In some embodiments, the single domain antibody comprises one or more framework(s) derived from a VHH domain comprising the sequence of SEQ ID NO: 71. In some embodiments, the single domain antibody comprises one or more framework(s) derived from a VHH domain comprising the sequence of SEQ ID NO: 72. In some embodiments, the single domain antibody comprises one or more framework(s) derived from a VHH domain comprising the sequence of SEQ ID NO: 73. In some embodiments, the single domain antibody comprises one or more framework(s) derived from a VHH domain comprising the sequence of SEQ ID NO: 74. In some embodiments, the single domain antibody comprises one or more framework(s) derived from a VHH domain comprising the sequence of SEQ ID NO: 75. In some embodiments, the single domain antibody comprises one or more framework(s) derived from a VHH domain comprising the sequence of SEQ ID NO: 76. In some embodiments, the single domain antibody comprises one or more framework(s) derived from a VHH domain comprising the sequence of SEQ ID NO: 77. In some embodiments, the single domain antibody comprises one or more framework(s) derived from a VHH domain comprising the sequence of SEQ ID NO: 78. In some embodiments, the single domain antibody comprises one or more framework(s) derived from a VHH domain comprising the sequence of SEQ ID NO: 79. In some embodiments, the single domain antibody comprises one or more framework(s) derived from a VHH domain comprising the sequence of SEQ ID NO: 80. In some embodiments, the single domain antibody comprises one or more framework(s) derived from a VHH domain comprising the sequence of SEQ ID NO: 81. In some embodiments, the single domain antibody comprises one or more framework(s) derived from a VHH domain comprising the sequence of SEQ ID NO: 82. In some embodiments, the single domain antibody comprises one or more framework(s) derived from a VHH domain comprising the sequence of SEQ ID NO: 83. In some embodiments, the single domain antibody comprises one or more framework(s) derived from a VHH domain comprising the sequence of SEQ ID NO: 84. In some embodiments, the single domain antibody comprises one or more framework(s) derived from a VHH domain comprising the sequence of SEQ ID NO: 85. In some embodiments, the single domain antibody comprises one or more framework(s) derived from a VHH domain comprising the sequence of SEQ ID NO: 86. In some embodiments, the single domain antibody comprises one or more framework(s) derived from a VHH domain comprising the sequence of SEQ ID NO: 87. In some embodiments, the single domain antibody comprises one or more framework(s) derived from a VHH domain comprising the sequence of SEQ ID NO: 88. In some embodiments, the single domain antibody comprises one or more framework(s) derived from a VHH domain comprising the sequence of SEQ ID NO: 89. In some embodiments, the single domain antibody comprises one or more framework(s) derived from a VHH domain comprising the sequence of SEQ ID NO: 90. In some embodiments, the single domain antibody comprises one or more framework(s) derived from a VHH domain comprising the sequence of SEQ ID NO: 91. In some embodiments, the single domain antibody comprises one or more framework(s) derived from a VHH domain comprising the sequence of SEQ ID NO: 92. In some embodiments, the single domain antibody comprises one or more framework(s) derived from a VHH domain comprising the sequence of SEQ ID NO: 93. In some embodiments, the single domain antibody comprises one or more framework(s) derived from a VHH domain comprising the sequence of SEQ ID NO: 94. In some embodiments, the single domain antibody comprises one or more framework(s) derived from a VHH domain comprising the sequence of SEQ ID NO: 95. In some embodiments, the single domain antibody comprises one or more framework(s) derived from a VHH domain comprising the sequence of SEQ ID NO: 96. In some embodiments, the single domain antibody comprises one or more framework(s) derived from a VHH domain comprising the sequence of SEQ ID NO: 97. In some embodiments, the single domain antibody comprises one or more framework(s) derived from a VHH domain comprising the sequence of SEQ ID NO: 98. In some embodiments, the single domain antibody comprises one or more framework(s) derived from a VHH domain comprising the sequence of SEQ ID NO: 99. In some embodiments, the single domain antibody comprises one or more framework(s) derived from a VHH domain comprising the sequence of SEQ ID NO: 100. In some embodiments, the single domain antibody comprises one or more framework(s) derived from a VHH domain comprising the sequence of SEQ ID NO: 101. In some embodiments, the single domain antibody comprises one or more framework(s) derived from a VHH domain comprising the sequence of SEQ ID NO: 102. In some embodiments, the single domain antibody comprises one or more framework(s) derived from a VHH domain comprising the sequence of SEQ ID NO: 103. In some embodiments, the single domain antibody comprises one or more framework(s) derived from a VHH domain comprising the sequence of SEQ ID NO: 104. In some embodiments, the single domain antibody comprises one or more framework(s) derived from a VHH domain comprising the sequence of SEQ ID NO: 105. In some embodiments, the single domain antibody comprises one or more framework(s) derived from a VHH domain comprising the sequence of SEQ ID NO: 106. In some embodiments, the single domain antibody comprises one or more framework(s) derived from a VHH domain comprising the sequence of SEQ ID NO: 107. In some embodiments, the single domain antibody comprises one or more framework(s) derived from a VHH domain comprising the sequence of SEQ ID NO: 108. In some embodiments, the single domain antibody comprises one or more framework(s) derived from a VHH domain comprising the sequence of SEQ ID NO: 109. In some embodiments, the single domain antibody comprises one or more framework(s) derived from a VHH domain comprising the sequence of SEQ ID NO: 110. In some embodiments, the single domain antibody comprises one or more framework(s) derived from a VHH domain comprising the sequence of SEQ ID NO: 111. In some embodiments, the single domain antibody comprises one or more framework(s) derived from a VHH domain comprising the sequence of SEQ ID NO: 112. In some embodiments, the single domain antibody comprises one or more framework(s) derived from a VHH domain comprising the sequence of SEQ ID NO: 113. In some embodiments, the single domain antibody comprises one or more framework(s) derived from a VHH domain comprising the sequence of SEQ ID NO: 114. In some embodiments, the single domain antibody comprises one or more framework(s) derived from a VHH domain comprising the sequence of SEQ ID NO: 115. In some embodiments, the single domain antibody comprises one or more framework(s) derived from a VHH domain comprising the sequence of SEQ ID NO: 116. In some embodiments, the single domain antibody comprises one or more framework(s) derived from a VHH domain comprising the sequence of SEQ ID NO: 117. In some embodiments, the single domain antibody comprises one or more framework(s) derived from a VHH domain comprising the sequence of SEQ ID NO: 118. In some embodiments, the single domain antibody comprises one or more framework(s) derived from a VHH domain comprising the sequence of SEQ ID NO: 119. In some embodiments, the single domain antibody comprises one or more framework(s) derived from a VHH domain comprising the sequence of SEQ ID NO: 120. In some embodiments, the single domain antibody comprises one or more framework(s) derived from a VHH domain comprising the sequence of SEQ ID NO: 121. In some embodiments, the single domain antibody comprises one or more framework(s) derived from a VHH domain comprising the sequence of SEQ ID NO: 122.

[0421] Framework regions described herein are determined based upon the boundaries of the CDR numbering system. In other words, if the CDRs are determined by, e.g., Kabat, IMGT, or Chothia, then the framework regions are the amino acid residues surrounding the CDRs in the variable region in the format, from the N-terminus to C-terminus: FR1-CDR1-FR2-CDR2-FR3-CDR3-FR4. For example, FR1 is defined as the amino acid residues N-terminal to the CDR1 amino acid residues as defined by, e.g., the Kabat numbering system, the IMGT numbering system, or the Chothia numbering system, FR2 is defined as the amino acid residues between CDR1 and CDR2 amino acid residues as defined by, e.g., the Kabat numbering system, the IMGT numbering system, or the Chothia numbering system, FR3 is defined as the amino acid residues between CDR2 and CDR3 amino acid residues as defined by, e.g., the Kabat numbering system, the IMGT numbering system, or the Chothia numbering system, and FR4 is defined as the amino acid residues C-terminal to the CDR3 amino acid residues as defined by, e.g., the Kabat numbering system, the IMGT numbering system, or the Chothia numbering system.

[0422] In some embodiments, there is provided an isolated anti-plgR single domain antibody comprising a VHH domain having the amino acid sequence of SEQ ID NO: 1. In some embodiments, there is provided an isolated anti-plgR single domain antibody comprising a VHH domain having the amino acid sequence of SEQ ID NO: 2. In some embodiments, there is provided an isolated anti-plgR single domain antibody comprising a VHH domain having the amino acid sequence of SEQ ID NO: 3. In some embodiments, there is provided an isolated anti-plgR single domain antibody comprising a VHH domain having the amino acid sequence of SEQ ID NO: 4. In some embodiments, there is provided an isolated anti-plgR single domain antibody comprising a VHH domain having the amino acid sequence of SEQ ID NO: 5. In some embodiments, there is provided an isolated anti-plgR single domain antibody comprising a VHH domain having the amino acid sequence of SEQ ID NO: 6. In some embodiments, there is provided an isolated anti-plgR single domain antibody comprising a VHH domain having the amino acid sequence of SEQ ID NO: 7. In some embodiments, there is provided an isolated anti-plgR single domain antibody comprising a VHH domain having the amino acid sequence of SEQ ID NO: 8. In some embodiments, there is provided an isolated anti-plgR single domain antibody comprising a VHH domain having the amino acid sequence of SEQ ID NO: 9. In some embodiments, there is provided an isolated anti-plgR single domain antibody comprising a VHH domain having the amino acid sequence of SEQ ID NO: 10. In some embodiments, there is provided an isolated anti-plgR single domain antibody comprising a VHH domain having the amino acid sequence of SEQ ID NO: 11. In some embodiments, there is provided an isolated anti-plgR single domain antibody comprising a VHH domain having the amino acid sequence of SEQ ID NO: 12. In some embodiments, there is provided an isolated anti-plgR single domain antibody comprising a VHH domain having the amino acid sequence of SEQ ID NO: 13. In some embodiments, there is provided an isolated anti-plgR single domain antibody comprising a VHH domain having the amino acid sequence of SEQ ID NO: 14. In some embodiments, there is provided an isolated anti-plgR single domain antibody comprising a VHH domain having the amino acid sequence of SEQ ID NO: 15. In some embodiments, there is provided an isolated anti-plgR single domain antibody comprising a VHH domain having the amino acid sequence of SEQ ID NO: 16. In some embodiments, there is provided an isolated anti-plgR single domain antibody comprising a VHH domain having the amino acid sequence of SEQ ID NO: 17. In some embodiments, there is provided an isolated anti-plgR single domain antibody comprising a VHH domain having the amino acid sequence of SEQ ID NO: 18. In some embodiments, there is provided an isolated anti-plgR single domain antibody comprising a VHH domain having the amino acid sequence of SEQ ID NO: 19. In some embodiments, there is provided an isolated anti-plgR single domain antibody comprising a VHH domain having the amino acid sequence of SEQ ID NO: 20. In some embodiments, there is provided an isolated anti-plgR single domain antibody comprising a VHH domain having the amino acid sequence of SEQ ID NO: 21. In some embodiments, there is provided an isolated anti-plgR single domain antibody comprising a VHH domain having the amino acid sequence of SEQ ID NO: 22. In some embodiments, there is provided an isolated anti-plgR single domain antibody comprising a VHH domain having the amino acid sequence of SEQ ID NO: 23. In some embodiments, there is provided an isolated anti-plgR single domain antibody comprising a VHH domain having the amino acid sequence of SEQ ID NO: 24. In some embodiments, there is provided an isolated anti-plgR single domain antibody comprising a VHH domain having the amino acid sequence of SEQ ID NO: 25. In some embodiments, there is provided an isolated anti-plgR single domain antibody comprising a VHH domain having the amino acid sequence of SEQ ID NO: 26. In some embodiments, there is provided an isolated anti-plgR single domain antibody comprising a VHH domain having the amino acid sequence of SEQ ID NO: 27. In some embodiments, there is provided an isolated anti-plgR single domain antibody comprising a VHH domain having the amino acid sequence of SEQ ID NO: 28. In some embodiments, there is provided an isolated anti-plgR single domain antibody comprising a VHH domain having the amino acid sequence of SEQ ID NO: 29. In some embodiments, there is provided an isolated anti-plgR single domain antibody comprising a VHH domain having the amino acid sequence of SEQ ID NO: 30. In some embodiments, there is provided an isolated anti-plgR single domain antibody comprising a VHH domain having the amino acid sequence of SEQ ID NO: 31. In some embodiments, there is provided an isolated anti-plgR single domain antibody comprising a VHH domain having the amino acid sequence of SEQ ID NO: 32. In some embodiments, there is provided an isolated anti-plgR single domain antibody comprising a VHH domain having the amino acid sequence of SEQ ID NO: 33. In some embodiments, there is provided an isolated anti-plgR single domain antibody comprising a VHH domain having the amino acid sequence of SEQ ID NO: 34. In some embodiments, there is provided an isolated anti-plgR single domain antibody comprising a VHH domain having the amino acid sequence of SEQ ID NO: 35. In some embodiments, there is provided an isolated anti-plgR single domain antibody comprising a VHH domain having the amino acid sequence of SEQ ID NO: 36. In some embodiments, there is provided an isolated anti-plgR single domain antibody comprising a VHH domain having the amino acid sequence of SEQ ID NO: 37. In some embodiments, there is provided an isolated anti-plgR single domain antibody comprising a VHH domain having the amino acid sequence of SEQ ID NO: 38. In some embodiments, there is provided an isolated anti-plgR single domain antibody comprising a VHH domain having the amino acid sequence of SEQ ID NO: 39. In some embodiments, there is provided an isolated anti-plgR single domain antibody comprising a VHH domain having the amino acid sequence of SEQ ID NO: 40. In some embodiments, there is provided an isolated anti-plgR single domain antibody comprising a VHH domain having the amino acid sequence of SEQ ID NO: 41. In some embodiments, there is provided an isolated anti-plgR single domain antibody comprising a VHH domain having the amino acid sequence of SEQ ID NO: 42. In some embodiments, there is provided an isolated anti-plgR single domain antibody comprising a VHH domain having the amino acid sequence of SEQ ID NO: 43. In some embodiments, there is provided an isolated anti-plgR single domain antibody comprising a VHH domain having the amino acid sequence of SEQ ID NO: 44. In some embodiments, there is provided an isolated anti-plgR single domain antibody comprising a VHH domain having the amino acid sequence of SEQ ID NO: 45. In some embodiments, there is provided an isolated anti-plgR single domain antibody comprising a VHH domain having the amino acid sequence of SEQ ID NO: 46. In some embodiments, there is provided an isolated anti-plgR single domain antibody comprising a VHH domain having the amino acid sequence of SEQ ID NO: 47. In some embodiments, there is provided an isolated anti-plgR single domain antibody comprising a VHH domain having the amino acid sequence of SEQ ID NO: 48. In some embodiments, there is provided an isolated anti-plgR single domain antibody comprising a VHH domain having the amino acid sequence of SEQ ID NO: 49. In some embodiments, there is provided an isolated anti-plgR single domain antibody comprising a VHH domain having the amino acid sequence of SEQ ID NO: 50. In some embodiments, there is provided an isolated anti-plgR single domain antibody comprising a VHH domain having the amino acid sequence of SEQ ID NO: 51. In some embodiments, there is provided an isolated anti-plgR single domain antibody comprising a VHH domain having the amino acid sequence of SEQ ID NO: 52. In some embodiments, there is provided an isolated anti-plgR single domain antibody comprising a VHH domain having the amino acid sequence of SEQ ID NO: 53. In some embodiments, there is provided an isolated anti-plgR single domain antibody comprising a VHH domain having the amino acid sequence of SEQ ID NO: 54. In some embodiments, there is provided an isolated anti-plgR single domain antibody comprising a VHH domain having the amino acid sequence of SEQ ID NO: 55. In some embodiments, there is provided an isolated anti-plgR single domain antibody comprising a VHH domain having the amino acid sequence of SEQ ID NO: 56. In some embodiments, there is provided an isolated anti-plgR single domain antibody comprising a VHH domain having the amino acid sequence of SEQ ID NO: 57. In some embodiments, there is provided an isolated anti-plgR single domain antibody comprising a VHH domain having the amino acid sequence of SEQ ID NO: 58. In some embodiments, there is provided an isolated anti-plgR single domain antibody comprising a VHH domain having the amino acid sequence of SEQ ID NO: 59. In some embodiments, there is provided an isolated anti-plgR single domain antibody comprising a VHH domain having the amino acid sequence of SEQ ID NO: 60. In some embodiments, there is provided an isolated anti-plgR single domain antibody comprising a VHH domain having the amino acid sequence of SEQ ID NO: 61. In some embodiments, there is provided an isolated anti-plgR single domain antibody comprising a VHH domain having the amino acid sequence of SEQ ID NO: 62. In some embodiments, there is provided an isolated anti-plgR single domain antibody comprising a VHH domain having the amino acid sequence of SEQ ID NO: 63. In some embodiments, there is provided an isolated anti-plgR single domain antibody comprising a VHH domain having the amino acid sequence of SEQ ID NO: 64. In some embodiments, there is provided an isolated anti-plgR single domain antibody comprising a VHH domain having the amino acid sequence of SEQ ID NO: 65. In some embodiments, there is provided an isolated anti-plgR single domain antibody comprising a VHH domain having the amino acid sequence of SEQ ID NO: 66. In some embodiments, there is provided an isolated anti-plgR single domain antibody comprising a VHH domain having the amino acid sequence of SEQ ID NO: 67. In some embodiments, there is provided an isolated anti-plgR single domain antibody comprising a VHH domain having the amino acid sequence of SEQ ID NO: 68. In some embodiments, there is provided an isolated anti-plgR single domain antibody comprising a VHH domain having the amino acid sequence of SEQ ID NO: 69. In some embodiments, there is provided an isolated anti-plgR single domain antibody comprising a VHH domain having the amino acid sequence of SEQ ID NO: 70. In some embodiments, there is provided an isolated anti-plgR single domain antibody comprising a VHH domain having the amino acid sequence of SEQ ID NO: 71. In some embodiments, there is provided an isolated anti-plgR single domain antibody comprising a VHH domain having the amino acid sequence of SEQ ID NO: 72. In some embodiments, there is provided an isolated anti-plgR single domain antibody comprising a VHH domain having the amino acid sequence of SEQ ID NO: 73. In some embodiments, there is provided an isolated anti-plgR single domain antibody comprising a VHH domain having the amino acid sequence of SEQ ID NO: 74. In some embodiments, there is provided an isolated anti-plgR single domain antibody comprising a VHH domain having the amino acid sequence of SEQ ID NO: 75. In some embodiments, there is provided an isolated anti-plgR single domain antibody comprising a VHH domain having the amino acid sequence of SEQ ID NO: 76. In some embodiments, there is provided an isolated anti-plgR single domain antibody comprising a VHH domain having the amino acid sequence of SEQ ID NO: 77. In some embodiments, there is provided an isolated anti-plgR single domain antibody comprising a VHH domain having the amino acid sequence of SEQ ID NO: 78. In some embodiments, there is provided an isolated anti-plgR single domain antibody comprising a VHH domain having the amino acid sequence of SEQ ID NO: 79. In some embodiments, there is provided an isolated anti-plgR single domain antibody comprising a VHH domain having the amino acid sequence of SEQ ID NO: 80. In some embodiments, there is provided an isolated anti-plgR single domain antibody comprising a VHH domain having the amino acid sequence of SEQ ID NO: 81. In some embodiments, there is provided an isolated anti-plgR single domain antibody comprising a VHH domain having the amino acid sequence of SEQ ID NO: 82. In some embodiments, there is provided an isolated anti-plgR single domain antibody comprising a VHH domain having the amino acid sequence of SEQ ID NO: 83. In some embodiments, there is provided an isolated anti-plgR single domain antibody comprising a VHH domain having the amino acid sequence of SEQ ID NO: 84. In some embodiments, there is provided an isolated anti-plgR single domain antibody comprising a VHH domain having the amino acid sequence of SEQ ID NO: 85. In some embodiments, there is provided an isolated anti-plgR single domain antibody comprising a VHH domain having the amino acid sequence of SEQ ID NO: 86. In some embodiments, there is provided an isolated anti-plgR single domain antibody comprising a VHH domain having the amino acid sequence of SEQ ID NO: 87. In some embodiments, there is provided an isolated anti-plgR single domain antibody comprising a VHH domain having the amino acid sequence of SEQ ID NO: 88. In some embodiments, there is provided an isolated anti-plgR single domain antibody comprising a VHH domain having the amino acid sequence of SEQ ID NO: 89. In some embodiments, there is provided an isolated anti-plgR single domain antibody comprising a VHH domain having the amino acid sequence of SEQ ID NO: 90. In some embodiments, there is provided an isolated anti-plgR single domain antibody comprising a VHH domain having the amino acid sequence of SEQ ID NO: 91. In some embodiments, there is provided an isolated anti-plgR single domain antibody comprising a VHH domain having the amino acid sequence of SEQ ID NO: 92. In some embodiments, there is provided an isolated anti-plgR single domain antibody comprising a VHH domain having the amino acid sequence of SEQ ID NO: 93. In some embodiments, there is provided an isolated anti-plgR single domain antibody comprising a VHH domain having the amino acid sequence of SEQ ID NO: 94. In some embodiments, there is provided an isolated anti-plgR single domain antibody comprising a VHH domain having the amino acid sequence of SEQ ID NO: 95. In some embodiments, there is provided an isolated anti-plgR single domain antibody comprising a VHH domain having the amino acid sequence of SEQ ID NO: 96. In some embodiments, there is provided an isolated anti-plgR single domain antibody comprising a VHH domain having the amino acid sequence of SEQ ID NO: 97. In some embodiments, there is provided an isolated anti-plgR single domain antibody comprising a VHH domain having the amino acid sequence of SEQ ID NO: 98. In some embodiments, there is provided an isolated anti-plgR single domain antibody comprising a VHH domain having the amino acid sequence of SEQ ID NO: 99. In some embodiments, there is provided an isolated anti-plgR single domain antibody comprising a VHH domain having the amino acid sequence of SEQ ID NO: 100. In some embodiments, there is provided an isolated anti-plgR single domain antibody comprising a VHH domain having the amino acid sequence of SEQ ID NO: 101. In some embodiments, there is provided an isolated anti-plgR single domain antibody comprising a VHH domain having the amino acid sequence of SEQ ID NO: 102. In some embodiments, there is provided an isolated anti-plgR single domain antibody comprising a VHH domain having the amino acid sequence of SEQ ID NO: 103. In some embodiments, there is provided an isolated anti-plgR single domain antibody comprising a VHH domain having the amino acid sequence of SEQ ID NO: 104. In some embodiments, there is provided an isolated anti-plgR single domain antibody comprising a VHH domain having the amino acid sequence of SEQ ID NO: 105. In some embodiments, there is provided an isolated anti-plgR single domain antibody comprising a VHH domain having the amino acid sequence of SEQ ID NO: 106. In some embodiments, there is provided an isolated anti-plgR single domain antibody comprising a VHH domain having the amino acid sequence of SEQ ID NO: 107. In some embodiments, there is provided an isolated anti-plgR single domain antibody comprising a VHH domain having the amino acid sequence of SEQ ID NO: 108. In some embodiments, there is provided an isolated anti-plgR single domain antibody comprising a VHH domain having the amino acid sequence of SEQ ID NO: 109. In some embodiments, there is provided an isolated anti-plgR single domain antibody comprising a VHH domain having the amino acid sequence of SEQ ID NO: 110. In some embodiments, there is provided an isolated anti-plgR single domain antibody comprising a VHH domain having the amino acid sequence of SEQ ID NO: 111. In some embodiments, there is provided an isolated anti-plgR single domain antibody comprising a VHH domain having the amino acid sequence of SEQ ID NO: 112. In some embodiments, there is provided an isolated anti-plgR single domain antibody comprising a VHH domain having the amino acid sequence of SEQ ID NO: 113. In some embodiments, there is provided an isolated anti-plgR single domain antibody comprising a VHH domain having the amino acid sequence of SEQ ID NO: 114. In some embodiments, there is provided an isolated anti-plgR single domain antibody comprising a VHH domain having the amino acid sequence of SEQ ID NO: 115. In some embodiments, there is provided an isolated anti-plgR single domain antibody comprising a VHH domain having the amino acid sequence of SEQ ID NO: 116. In some embodiments, there is provided an isolated anti-plgR single domain antibody comprising a VHH domain having the amino acid sequence of SEQ ID NO: 117. In some embodiments, there is provided an isolated anti-plgR single domain antibody comprising a VHH domain having the amino acid sequence of SEQ ID NO: 118. In some embodiments, there is provided an isolated anti-plgR single domain antibody comprising a VHH domain having the amino acid sequence of SEQ ID NO: 119. In some embodiments, there is provided an isolated anti-plgR single domain antibody comprising a VHH domain having the amino acid sequence of SEQ ID NO: 120. In some embodiments, there is provided an isolated anti-plgR single domain antibody comprising a VHH domain having the amino acid sequence of SEQ ID NO: 121. In some embodiments, there is provided an isolated anti-plgR single domain antibody comprising a VHH domain having the amino acid sequence of SEQ ID NO: 122.

[0423] In certain embodiments, an antibody described herein or an antigen-binding fragment thereof comprises amino acid sequences with certain percent identity relative to any one of antibodies having SEQ ID NOs: 1 to 122.

[0424] The determination of percent identity between two sequences (e.g., amino acid sequences or nucleic acid sequences) can be accomplished using a mathematical algorithm. A non-limiting example of a mathematical algorithm utilized for the comparison of two sequences is the algorithm of Karlin and Altschul, Proc. Natl. Acad. Sci. U.S.A. 87:2264 2268 (1990), modified as in Karlin and Altschul, Proc. Natl. Acad. Sci. U.S.A. 90:5873 5877 (1993). Such an algorithm is incorporated into the NBLAST and XBLAST programs of Altschul et al., J. Mol. Biol. 215:403 (1990). BLAST nucleotide searches can be performed with the NBLAST nucleotide program parameters set, e.g., for score=100, word length=12 to obtain nucleotide sequences homologous to a nucleic acid molecules described herein. BLAST protein searches can be performed with the XBLAST program parameters set, e.g., to score 50, word length=3 to obtain amino acid sequences homologous to a protein molecule described herein. To obtain gapped alignments for comparison purposes, Gapped BLAST can be utilized as described in Altschul et al., Nucleic Acids Res. 25:3389 3402 (1997). Alternatively, PSI BLAST can be used to perform an iterated search which detects distant relationships between molecules (Id.). When utilizing BLAST, Gapped BLAST, and PSI Blast programs, the default parameters of the respective programs (e.g., of XBLAST and NBLAST) can be used (see, e.g., National Center for Biotechnology Information (NCBI) on the worldwide web, ncbi.nlm.nih.gov). Another non-limiting example of a mathematical algorithm utilized for the comparison of sequences is the algorithm of Myers and Miller, CABIOS 4:11-17 (1998). Such an algorithm is incorporated in the ALIGN program (version 2.0) which is part of the GCG sequence alignment software package. When utilizing the ALIGN program for comparing amino acid sequences, a PAM120 weight residue table, a gap length penalty of 12, and a gap penalty of 4 can be used. The percent identity between two sequences can be determined using techniques similar to those described above, with or without allowing gaps. In calculating percent identity, typically only exact matches are counted.

[0425] In some embodiments, there is provided an anti-plgR single domain antibody comprising a VHH domain having at least about any one of 75%, 80%, 85%, 86%, 87%, 88%, 89%, 90%, 91%, 92%, 93%, 94%, 95%, 96%, 97%, 98%, 99%, or 100% sequence identity to an amino acid sequence selected from SEQ ID NOs: 1 to 122. In some embodiments, a VHH sequence having at least about any one of 75%, 80%, 85%, 86%, 87%, 88%, 89%, 90%, 91%, 92%, 93%, 94%, 95%, 96% 97%, 98%, or 99% identity contains substitutions (e.g., conservative substitutions), insertions, or deletions relative to the reference sequence, but the anti-plgR single domain antibody comprising that sequence retains the ability to bind to plgR. In some embodiments, a total of 1 to 10 amino acids have been substituted, inserted and/or deleted in an amino acid sequence selected from SEQ ID NOs: 1 to 122. In some embodiments, substitutions, insertions, or deletions occur in regions outside the CDRs (i.e., in the FRs). Optionally, the anti-plgR single domain antibody comprises an amino acid sequence selected from SEQ ID NOs: 1 to 122, including post-translational modifications of that sequence.

[0426] In some embodiments, there is provided an isolated anti-plgR single domain antibody comprising a VHH domain having at least 75%, at least 80%, at least 85%, at least 90%, at least 91%, at least 92%, at least 93%, at least 94%, at least 95%, at least 96%, at least 97%, at least 98%, or at least 99% sequence identity to the amino acid sequence of SEQ ID NO: 1, wherein the single domain antibody binds to plgR. In some embodiments, there is provided an isolated anti-plgR single domain antibody comprising a VHH domain having at least 75%, at least 80%, at least 85%, at least 90%, at least 91%, at least 92%, at least 93%, at least 94%, at least 95%, at least 96%, at least 97%, at least 98%, or at least 99% sequence identity to the amino acid sequence of SEQ ID NO: 2, wherein the single domain antibody binds to plgR. In some embodiments, there is provided an isolated anti-plgR single domain antibody comprising a VHH domain having at least 75%, at least 80%, at least 85%, at least 90%, at least 91%, at least 92%, at least 93%, at least 94%, at least 95%, at least 96%, at least 97%, at least 98%, or at least 99% sequence identity to the amino acid sequence of SEQ ID NO: 3, wherein the single domain antibody binds to plgR. In some embodiments, there is provided an isolated anti-plgR single domain antibody comprising a VHH domain having at least 75%, at least 80%, at least 85%, at least 90%, at least 91%, at least 92%, at least 93%, at least 94%, at least 95%, at least 96%, at least 97%, at least 98%, or at least 99% sequence identity to the amino acid sequence of SEQ ID NO: 4, wherein the single domain antibody binds to plgR. In some embodiments, there is provided an isolated anti-plgR single domain antibody comprising a VHH domain having at least 75%, at least 80%, at least 85%, at least 90%, at least 91%, at least 92%, at least 93%, at least 94%, at least 95%, at least 96%, at least 97%, at least 98%, or at least 99% sequence identity to the amino acid sequence of SEQ ID NO: 5, wherein the single domain antibody binds to plgR. In some embodiments, there is provided an isolated anti-plgR single domain antibody comprising a VHH domain having at least 75%, at least 80%, at least 85%, at least 90%, at least 91%, at least 92%, at least 93%, at least 94%, at least 95%, at least 96%, at least 97%, at least 98%, or at least 99% sequence identity to the amino acid sequence of SEQ ID NO: 6, wherein the single domain antibody binds to plgR. In some embodiments, there is provided an isolated anti-plgR single domain antibody comprising a VHH domain having at least 75%, at least 80%, at least 85%, at least 90%, at least 91%, at least 92%, at least 93%, at least 94%, at least 95%, at least 96%, at least 97%, at least 98%, or at least 99% sequence identity to the amino acid sequence of SEQ ID NO: 7, wherein the single domain antibody binds to plgR. In some embodiments, there is provided an isolated anti-plgR single domain antibody comprising a VHH domain having at least 75%, at least 80%, at least 85%, at least 90%, at least 91%, at least 92%, at least 93%, at least 94%, at least 95%, at least 96%, at least 97%, at least 98%, or at least 99% sequence identity to the amino acid sequence of SEQ ID NO: 8, wherein the single domain antibody binds to plgR. In some embodiments, there is provided an isolated anti-plgR single domain antibody comprising a VHH domain having at least 75%, at least 80%, at least 85%, at least 90%, at least 91%, at least 92%, at least 93%, at least 94%, at least 95%, at least 96%, at least 97%, at least 98%, or at least 99% sequence identity to the amino acid sequence of SEQ ID NO: 9, wherein the single domain antibody binds to plgR. In some embodiments, there is provided an isolated anti-plgR single domain antibody comprising a VHH domain having at least 75%, at least 80%, at least 85%, at least 90%, at least 91%, at least 92%, at least 93%, at least 94%, at least 95%, at least 96%, at least 97%, at least 98%, or at least 99% sequence identity to the amino acid sequence of SEQ ID NO: 10, wherein the single domain antibody binds to plgR. In some embodiments, there is provided an isolated anti-plgR single domain antibody comprising a VHH domain having at least 75%, at least 80%, at least 85%, at least 90%, at least 91%, at least 92%, at least 93%, at least 94%, at least 95%, at least 96%, at least 97%, at least 98%, or at least 99% sequence identity to the amino acid sequence of SEQ ID NO: 11, wherein the single domain antibody binds to plgR. In some embodiments, there is provided an isolated anti-plgR single domain antibody comprising a VHH domain having at least 75%, at least 80%, at least 85%, at least 90%, at least 91%, at least 92%, at least 93%, at least 94%, at least 95%, at least 96%, at least 97%, at least 98%, or at least 99% sequence identity to the amino acid sequence of SEQ ID NO: 12, wherein the single domain antibody binds to plgR. In some embodiments, there is provided an isolated anti-plgR single domain antibody comprising a VHH domain having at least 75%, at least 80%, at least 85%, at least 90%, at least 91%, at least 92%, at least 93%, at least 94%, at least 95%, at least 96%, at least 97%, at least 98%, or at least 99% sequence identity to the amino acid sequence of SEQ ID NO: 13, wherein the single domain antibody binds to plgR. In some embodiments, there is provided an isolated anti-plgR single domain antibody comprising a VHH domain having at least 75%, at least 80%, at least 85%, at least 90%, at least 91%, at least 92%, at least 93%, at least 94%, at least 95%, at least 96%, at least 97%, at least 98%, or at least 99% sequence identity to the amino acid sequence of SEQ ID NO: 14, wherein the single domain antibody binds to plgR. In some embodiments, there is provided an isolated anti-plgR single domain antibody comprising a VHH domain having at least 75%, at least 80%, at least 85%, at least 90%, at least 91%, at least 92%, at least 93%, at least 94%, at least 95%, at least 96%, at least 97%, at least 98%, or at least 99% sequence identity to the amino acid sequence of SEQ ID NO: 15, wherein the single domain antibody binds to plgR. In some embodiments, there is provided an isolated anti-plgR single domain antibody comprising a VHH domain having at least 75%, at least 80%, at least 85%, at least 90%, at least 91%, at least 92%, at least 93%, at least 94%, at least 95%, at least 96%, at least 97%, at least 98%, or at least 99% sequence identity to the amino acid sequence of SEQ ID NO: 16, wherein the single domain antibody binds to plgR. In some embodiments, there is provided an isolated anti-plgR single domain antibody comprising a VHH domain having at least 75%, at least 80%, at least 85%, at least 90%, at least 91%, at least 92%, at least 93%, at least 94%, at least 95%, at least 96%, at least 97%, at least 98%, or at least 99% sequence identity to the amino acid sequence of SEQ ID NO: 17, wherein the single domain antibody binds to plgR. In some embodiments, there is provided an isolated anti-plgR single domain antibody comprising a VHH domain having at least 75%, at least 80%, at least 85%, at least 90%, at least 91%, at least 92%, at least 93%, at least 94%, at least 95%, at least 96%, at least 97%, at least 98%, or at least 99% sequence identity to the amino acid sequence of SEQ ID NO: 18, wherein the single domain antibody binds to plgR. In some embodiments, there is provided an isolated anti-plgR single domain antibody comprising a VHH domain having at least 75%, at least 80%, at least 85%, at least 90%, at least 91%, at least 92%, at least 93%, at least 94%, at least 95%, at least 96%, at least 97%, at least 98%, or at least 99% sequence identity to the amino acid sequence of SEQ ID NO: 19, wherein the single domain antibody binds to plgR. In some embodiments, there is provided an isolated anti-plgR single domain antibody comprising a VHH domain having at least 75%, at least 80%, at least 85%, at least 90%, at least 91%, at least 92%, at least 93%, at least 94%, at least 95%, at least 96%, at least 97%, at least 98%, or at least 99% sequence identity to the amino acid sequence of SEQ ID NO: 20, wherein the single domain antibody binds to plgR. In some embodiments, there is provided an isolated anti-plgR single domain antibody comprising a VHH domain having at least 75%, at least 80%, at least 85%, at least 90%, at least 91%, at least 92%, at least 93%, at least 94%, at least 95%, at least 96%, at least 97%, at least 98%, or at least 99% sequence identity to the amino acid sequence of SEQ ID NO: 21, wherein the single domain antibody binds to plgR. In some embodiments, there is provided an isolated anti-plgR single domain antibody comprising a VHH domain having at least 75%, at least 80%, at least 85%, at least 90%, at least 91%, at least 92%, at least 93%, at least 94%, at least 95%, at least 96%, at least 97%, at least 98%, or at least 99% sequence identity to the amino acid sequence of SEQ ID NO: 22, wherein the single domain antibody binds to plgR. In some embodiments, there is provided an isolated anti-plgR single domain antibody comprising a VHH domain having at least 75%, at least 80%, at least 85%, at least 90%, at least 91%, at least 92%, at least 93%, at least 94%, at least 95%, at least 96%, at least 97%, at least 98%, or at least 99% sequence identity to the amino acid sequence of SEQ ID NO: 23, wherein the single domain antibody binds to plgR. In some embodiments, there is provided an isolated anti-plgR single domain antibody comprising a VHH domain having at least 75%, at least 80%, at least 85%, at least 90%, at least 91%, at least 92%, at least 93%, at least 94%, at least 95%, at least 96%, at least 97%, at least 98%, or at least 99% sequence identity to the amino acid sequence of SEQ ID NO: 24, wherein the single domain antibody binds to plgR. In some embodiments, there is provided an isolated anti-plgR single domain antibody comprising a VHH domain having at least 75%, at least 80%, at least 85%, at least 90%, at least 91%, at least 92%, at least 93%, at least 94%, at least 95%, at least 96%, at least 97%, at least 98%, or at least 99% sequence identity to the amino acid sequence of SEQ ID NO: 25, wherein the single domain antibody binds to plgR. In some embodiments, there is provided an isolated anti-plgR single domain antibody comprising a VHH domain having at least 75%, at least 80%, at least 85%, at least 90%, at least 91%, at least 92%, at least 93%, at least 94%, at least 95%, at least 96%, at least 97%, at least 98%, or at least 99% sequence identity to the amino acid sequence of SEQ ID NO: 26, wherein the single domain antibody binds to plgR. In some embodiments, there is provided an isolated anti-plgR single domain antibody comprising a VHH domain having at least 75%, at least 80%, at least 85%, at least 90%, at least 91%, at least 92%, at least 93%, at least 94%, at least 95%, at least 96%, at least 97%, at least 98%, or at least 99% sequence identity to the amino acid sequence of SEQ ID NO: 27, wherein the single domain antibody binds to plgR. In some embodiments, there is provided an isolated anti-plgR single domain antibody comprising a VHH domain having at least 75%, at least 80%, at least 85%, at least 90%, at least 91%, at least 92%, at least 93%, at least 94%, at least 95%, at least 96%, at least 97%, at least 98%, or at least 99% sequence identity to the amino acid sequence of SEQ ID NO: 28, wherein the single domain antibody binds to plgR. In some embodiments, there is provided an isolated anti-plgR single domain antibody comprising a VHH domain having at least 75%, at least 80%, at least 85%, at least 90%, at least 91%, at least 92%, at least 93%, at least 94%, at least 95%, at least 96%, at least 97%, at least 98%, or at least 99% sequence identity to the amino acid sequence of SEQ ID NO: 29, wherein the single domain antibody binds to plgR. In some embodiments, there is provided an isolated anti-plgR single domain antibody comprising a VHH domain having at least 75%, at least 80%, at least 85%, at least 90%, at least 91%, at least 92%, at least 93%, at least 94%, at least 95%, at least 96%, at least 97%, at least 98%, or at least 99% sequence identity to the amino acid sequence of SEQ ID NO: 30, wherein the single domain antibody binds to plgR. In some embodiments, there is provided an isolated anti-plgR single domain antibody comprising a VHH domain having at least 75%, at least 80%, at least 85%, at least 90%, at least 91%, at least 92%, at least 93%, at least 94%, at least 95%, at least 96%, at least 97%, at least 98%, or at least 99% sequence identity to the amino acid sequence of SEQ ID NO: 31, wherein the single domain antibody binds to plgR. In some embodiments, there is provided an isolated anti-plgR single domain antibody comprising a VHH domain having at least 75%, at least 80%, at least 85%, at least 90%, at least 91%, at least 92%, at least 93%, at least 94%, at least 95%, at least 96%, at least 97%, at least 98%, or at least 99% sequence identity to the amino acid sequence of SEQ ID NO: 32, wherein the single domain antibody binds to plgR. In some embodiments, there is provided an isolated anti-plgR single domain antibody comprising a VHH domain having at least 75%, at least 80%, at least 85%, at least 90%, at least 91%, at least 92%, at least 93%, at least 94%, at least 95%, at least 96%, at least 97%, at least 98%, or at least 99% sequence identity to the amino acid sequence of SEQ ID NO: 33, wherein the single domain antibody binds to plgR. In some embodiments, there is provided an isolated anti-plgR single domain antibody comprising a VHH domain having at least 75%, at least 80%, at least 85%, at least 90%, at least 91%, at least 92%, at least 93%, at least 94%, at least 95%, at least 96%, at least 97%, at least 98%, or at least 99% sequence identity to the amino acid sequence of SEQ ID NO: 34, wherein the single domain antibody binds to plgR. In some embodiments, there is provided an isolated anti-plgR single domain antibody comprising a VHH domain having at least 75%, at least 80%, at least 85%, at least 90%, at least 91%, at least 92%, at least 93%, at least 94%, at least 95%, at least 96%, at least 97%, at least 98%, or at least 99% sequence identity to the amino acid sequence of SEQ ID NO: 35, wherein the single domain antibody binds to plgR. In some embodiments, there is provided an isolated anti-plgR single domain antibody comprising a VHH domain having at least 75%, at least 80%, at least 85%, at least 90%, at least 91%, at least 92%, at least 93%, at least 94%, at least 95%, at least 96%, at least 97%, at least 98%, or at least 99% sequence identity to the amino acid sequence of SEQ ID NO: 36, wherein the single domain antibody binds to plgR. In some embodiments, there is provided an isolated anti-plgR single domain antibody comprising a VHH domain having at least 75%, at least 80%, at least 85%, at least 90%, at least 91%, at least 92%, at least 93%, at least 94%, at least 95%, at least 96%, at least 97%, at least 98%, or at least 99% sequence identity to the amino acid sequence of SEQ ID NO: 37, wherein the single domain antibody binds to plgR. In some embodiments, there is provided an isolated anti-plgR single domain antibody comprising a VHH domain having at least 75%, at least 80%, at least 85%, at least 90%, at least 91%, at least 92%, at least 93%, at least 94%, at least 95%, at least 96%, at least 97%, at least 98%, or at least 99% sequence identity to the amino acid sequence of SEQ ID NO: 38, wherein the single domain antibody binds to plgR. In some embodiments, there is provided an isolated anti-plgR single domain antibody comprising a VHH domain having at least 75%, at least 80%, at least 85%, at least 90%, at least 91%, at least 92%, at least 93%, at least 94%, at least 95%, at least 96%, at least 97%, at least 98%, or at least 99% sequence identity to the amino acid sequence of SEQ ID NO: 39, wherein the single domain antibody binds to plgR. In some embodiments, there is provided an isolated anti-plgR single domain antibody comprising a VHH domain having at least 75%, at least 80%, at least 85%, at least 90%, at least 91%, at least 92%, at least 93%, at least 94%, at least 95%, at least 96%, at least 97%, at least 98%, or at least 99% sequence identity to the amino acid sequence of SEQ ID NO: 40, wherein the single domain antibody binds to plgR. In some embodiments, there is provided an isolated anti-plgR single domain antibody comprising a VHH domain having at least 75%, at least 80%, at least 85%, at least 90%, at least 91%, at least 92%, at least 93%, at least 94%, at least 95%, at least 96%, at least 97%, at least 98%, or at least 99% sequence identity to the amino acid sequence of SEQ ID NO: 41, wherein the single domain antibody binds to plgR. In some embodiments, there is provided an isolated anti-plgR single domain antibody comprising a VHH domain having at least 75%, at least 80%, at least 85%, at least 90%, at least 91%, at least 92%, at least 93%, at least 94%, at least 95%, at least 96%, at least 97%, at least 98%, or at least 99% sequence identity to the amino acid sequence of SEQ ID NO: 42, wherein the single domain antibody binds to plgR. In some embodiments, there is provided an isolated anti-plgR single domain antibody comprising a VHH domain having at least 75%, at least 80%, at least 85%, at least 90%, at least 91%, at least 92%, at least 93%, at least 94%, at least 95%, at least 96%, at least 97%, at least 98%, or at least 99% sequence identity to the amino acid sequence of SEQ ID NO: 43, wherein the single domain antibody binds to plgR. In some embodiments, there is provided an isolated anti-plgR single domain antibody comprising a VHH domain having at least 75%, at least 80%, at least 85%, at least 90%, at least 91%, at least 92%, at least 93%, at least 94%, at least 95%, at least 96%, at least 97%, at least 98%, or at least 99% sequence identity to the amino acid sequence of SEQ ID NO: 44, wherein the single domain antibody binds to plgR. In some embodiments, there is provided an isolated anti-plgR single domain antibody comprising a VHH domain having at least 75%, at least 80%, at least 85%, at least 90%, at least 91%, at least 92%, at least 93%, at least 94%, at least 95%, at least 96%, at least 97%, at least 98%, or at least 99% sequence identity to the amino acid sequence of SEQ ID NO: 45, wherein the single domain antibody binds to plgR. In some embodiments, there is provided an isolated anti-plgR single domain antibody comprising a VHH domain having at least 75%, at least 80%, at least 85%, at least 90%, at least 91%, at least 92%, at least 93%, at least 94%, at least 95%, at least 96%, at least 97%, at least 98%, or at least 99% sequence identity to the amino acid sequence of SEQ ID NO: 46, wherein the single domain antibody binds to plgR. In some embodiments, there is provided an isolated anti-plgR single domain antibody comprising a VHH domain having at least 75%, at least 80%, at least 85%, at least 90%, at least 91%, at least 92%, at least 93%, at least 94%, at least 95%, at least 96%, at least 97%, at least 98%, or at least 99% sequence identity to the amino acid sequence of SEQ ID NO: 47, wherein the single domain antibody binds to plgR. In some embodiments, there is provided an isolated anti-plgR single domain antibody comprising a VHH domain having at least 75%, at least 80%, at least 85%, at least 90%, at least 91%, at least 92%, at least 93%, at least 94%, at least 95%, at least 96%, at least 97%, at least 98%, or at least 99% sequence identity to the amino acid sequence of SEQ ID NO: 48, wherein the single domain antibody binds to plgR. In some embodiments, there is provided an isolated anti-plgR single domain antibody comprising a VHH domain having at least 75%, at least 80%, at least 85%, at least 90%, at least 91%, at least 92%, at least 93%, at least 94%, at least 95%, at least 96%, at least 97%, at least 98%, or at least 99% sequence identity to the amino acid sequence of SEQ ID NO: 49, wherein the single domain antibody binds to plgR. In some embodiments, there is provided an isolated anti-plgR single domain antibody comprising a VHH domain having at least 75%, at least 80%, at least 85%, at least 90%, at least 91%, at least 92%, at least 93%, at least 94%, at least 95%, at least 96%, at least 97%, at least 98%, or at least 99% sequence identity to the amino acid sequence of SEQ ID NO: 50, wherein the single domain antibody binds to plgR. In some embodiments, there is provided an isolated anti-plgR single domain antibody comprising a VHH domain having at least 75%, at least 80%, at least 85%, at least 90%, at least 91%, at least 92%, at least 93%, at least 94%, at least 95%, at least 96%, at least 97%, at least 98%, or at least 99% sequence identity to the amino acid sequence of SEQ ID NO: 51, wherein the single domain antibody binds to plgR. In some embodiments, there is provided an isolated anti-plgR single domain antibody comprising a VHH domain having at least 75%, at least 80%, at least 85%, at least 90%, at least 91%, at least 92%, at least 93%, at least 94%, at least 95%, at least 96%, at least 97%, at least 98%, or at least 99% sequence identity to the amino acid sequence of SEQ ID NO: 52, wherein the single domain antibody binds to plgR. In some embodiments, there is provided an isolated anti-plgR single domain antibody comprising a VHH domain having at least 75%, at least 80%, at least 85%, at least 90%, at least 91%, at least 92%, at least 93%, at least 94%, at least 95%, at least 96%, at least 97%, at least 98%, or at least 99% sequence identity to the amino acid sequence of SEQ ID NO: 53, wherein the single domain antibody binds to plgR. In some embodiments, there is provided an isolated anti-plgR single domain antibody comprising a VHH domain having at least 75%, at least 80%, at least 85%, at least 90%, at least 91%, at least 92%, at least 93%, at least 94%, at least 95%, at least 96%, at least 97%, at least 98%, or at least 99% sequence identity to the amino acid sequence of SEQ ID NO: 54, wherein the single domain antibody binds to plgR. In some embodiments, there is provided an isolated anti-plgR single domain antibody comprising a VHH domain having at least 75%, at least 80%, at least 85%, at least 90%, at least 91%, at least 92%, at least 93%, at least 94%, at least 95%, at least 96%, at least 97%, at least 98%, or at least 99% sequence identity to the amino acid sequence of SEQ ID NO: 55, wherein the single domain antibody binds to plgR. In some embodiments, there is provided an isolated anti-plgR single domain antibody comprising a VHH domain having at least 75%, at least 80%, at least 85%, at least 90%, at least 91%, at least 92%, at least 93%, at least 94%, at least 95%, at least 96%, at least 97%, at least 98%, or at least 99% sequence identity to the amino acid sequence of SEQ ID NO: 56, wherein the single domain antibody binds to plgR. In some embodiments, there is provided an isolated anti-plgR single domain antibody comprising a VHH domain having at least 75%, at least 80%, at least 85%, at least 90%, at least 91%, at least 92%, at least 93%, at least 94%, at least 95%, at least 96%, at least 97%, at least 98%, or at least 99% sequence identity to the amino acid sequence of SEQ ID NO: 57, wherein the single domain antibody binds to plgR. In some embodiments, there is provided an isolated anti-plgR single domain antibody comprising a VHH domain having at least 75%, at least 80%, at least 85%, at least 90%, at least 91%, at least 92%, at least 93%, at least 94%, at least 95%, at least 96%, at least 97%, at least 98%, or at least 99% sequence identity to the amino acid sequence of SEQ ID NO: 58, wherein the single domain antibody binds to plgR. In some embodiments, there is provided an isolated anti-plgR single domain antibody comprising a VHH domain having at least 75%, at least 80%, at least 85%, at least 90%, at least 91%, at least 92%, at least 93%, at least 94%, at least 95%, at least 96%, at least 97%, at least 98%, or at least 99% sequence identity to the amino acid sequence of SEQ ID NO: 59, wherein the single domain antibody binds to plgR. In some embodiments, there is provided an isolated anti-plgR single domain antibody comprising a VHH domain having at least 75%, at least 80%, at least 85%, at least 90%, at least 91%, at least 92%, at least 93%, at least 94%, at least 95%, at least 96%, at least 97%, at least 98%, or at least 99% sequence identity to the amino acid sequence of SEQ ID NO: 60, wherein the single domain antibody binds to plgR. In some embodiments, there is provided an isolated anti-plgR single domain antibody comprising a VHH domain having at least 75%, at least 80%, at least 85%, at least 90%, at least 91%, at least 92%, at least 93%, at least 94%, at least 95%, at least 96%, at least 97%, at least 98%, or at least 99% sequence identity to the amino acid sequence of SEQ ID NO: 61, wherein the single domain antibody binds to plgR. In some embodiments, there is provided an isolated anti-plgR single domain antibody comprising a VHH domain having at least 75%, at least 80%, at least 85%, at least 90%, at least 91%, at least 92%, at least 93%, at least 94%, at least 95%, at least 96%, at least 97%, at least 98%, or at least 99% sequence identity to the amino acid sequence of SEQ ID NO: 62, wherein the single domain antibody binds to plgR. In some embodiments, there is provided an isolated anti-plgR single domain antibody comprising a VHH domain having at least 75%, at least 80%, at least 85%, at least 90%, at least 91%, at least 92%, at least 93%, at least 94%, at least 95%, at least 96%, at least 97%, at least 98%, or at least 99% sequence identity to the amino acid sequence of SEQ ID NO: 63, wherein the single domain antibody binds to plgR. In some embodiments, there is provided an isolated anti-plgR single domain antibody comprising a VHH domain having at least 75%, at least 80%, at least 85%, at least 90%, at least 91%, at least 92%, at least 93%, at least 94%, at least 95%, at least 96%, at least 97%, at least 98%, or at least 99% sequence identity to the amino acid sequence of SEQ ID NO: 64, wherein the single domain antibody binds to plgR. In some embodiments, there is provided an isolated anti-plgR single domain antibody comprising a VHH domain having at least 75%, at least 80%, at least 85%, at least 90%, at least 91%, at least 92%, at least 93%, at least 94%, at least 95%, at least 96%, at least 97%, at least 98%, or at least 99% sequence identity to the amino acid sequence of SEQ ID NO: 65, wherein the single domain antibody binds to plgR. In some embodiments, there is provided an isolated anti-plgR single domain antibody comprising a VHH domain having at least 75%, at least 80%, at least 85%, at least 90%, at least 91%, at least 92%, at least 93%, at least 94%, at least 95%, at least 96%, at least 97%, at least 98%, or at least 99% sequence identity to the amino acid sequence of SEQ ID NO: 66, wherein the single domain antibody binds to plgR. In some embodiments, there is provided an isolated anti-plgR single domain antibody comprising a VHH domain having at least 75%, at least 80%, at least 85%, at least 90%, at least 91%, at least 92%, at least 93%, at least 94%, at least 95%, at least 96%, at least 97%, at least 98%, or at least 99% sequence identity to the amino acid sequence of SEQ ID NO: 67, wherein the single domain antibody binds to plgR. In some embodiments, there is provided an isolated anti-plgR single domain antibody comprising a VHH domain having at least 75%, at least 80%, at least 85%, at least 90%, at least 91%, at least 92%, at least 93%, at least 94%, at least 95%, at least 96%, at least 97%, at least 98%, or at least 99% sequence identity to the amino acid sequence of SEQ ID NO: 68, wherein the single domain antibody binds to plgR. In some embodiments, there is provided an isolated anti-plgR single domain antibody comprising a VHH domain having at least 75%, at least 80%, at least 85%, at least 90%, at least 91%, at least 92%, at least 93%, at least 94%, at least 95%, at least 96%, at least 97%, at least 98%, or at least 99% sequence identity to the amino acid sequence of SEQ ID NO: 69, wherein the single domain antibody binds to plgR. In some embodiments, there is provided an isolated anti-plgR single domain antibody comprising a VHH domain having at least 75%, at least 80%, at least 85%, at least 90%, at least 91%, at least 92%, at least 93%, at least 94%, at least 95%, at least 96%, at least 97%, at least 98%, or at least 99% sequence identity to the amino acid sequence of SEQ ID NO: 70, wherein the single domain antibody binds to plgR. In some embodiments, there is provided an isolated anti-plgR single domain antibody comprising a VHH domain having at least 75%, at least 80%, at least 85%, at least 90%, at least 91%, at least 92%, at least 93%, at least 94%, at least 95%, at least 96%, at least 97%, at least 98%, or at least 99% sequence identity to the amino acid sequence of SEQ ID NO: 71, wherein the single domain antibody binds to plgR. In some embodiments, there is provided an isolated anti-plgR single domain antibody comprising a VHH domain having at least 75%, at least 80%, at least 85%, at least 90%, at least 91%, at least 92%, at least 93%, at least 94%, at least 95%, at least 96%, at least 97%, at least 98%, or at least 99% sequence identity to the amino acid sequence of SEQ ID NO: 72, wherein the single domain antibody binds to plgR. In some embodiments, there is provided an isolated anti-plgR single domain antibody comprising a VHH domain having at least 75%, at least 80%, at least 85%, at least 90%, at least 91%, at least 92%, at least 93%, at least 94%, at least 95%, at least 96%, at least 97%, at least 98%, or at least 99% sequence identity to the amino acid sequence of SEQ ID NO: 73, wherein the single domain antibody binds to plgR. In some embodiments, there is provided an isolated anti-plgR single domain antibody comprising a VHH domain having at least 75%, at least 80%, at least 85%, at least 90%, at least 91%, at least 92%, at least 93%, at least 94%, at least 95%, at least 96%, at least 97%, at least 98%, or at least 99% sequence identity to the amino acid sequence of SEQ ID NO: 74, wherein the single domain antibody binds to plgR. In some embodiments, there is provided an isolated anti-plgR single domain antibody comprising a VHH domain having at least 75%, at least 80%, at least 85%, at least 90%, at least 91%, at least 92%, at least 93%, at least 94%, at least 95%, at least 96%, at least 97%, at least 98%, or at least 99% sequence identity to the amino acid sequence of SEQ ID NO: 75, wherein the single domain antibody binds to plgR. In some embodiments, there is provided an isolated anti-plgR single domain antibody comprising a VHH domain having at least 75%, at least 80%, at least 85%, at least 90%, at least 91%, at least 92%, at least 93%, at least 94%, at least 95%, at least 96%, at least 97%, at least 98%, or at least 99% sequence identity to the amino acid sequence of SEQ ID NO: 76, wherein the single domain antibody binds to plgR. In some embodiments, there is provided an isolated anti-plgR single domain antibody comprising a VHH domain having at least 75%, at least 80%, at least 85%, at least 90%, at least 91%, at least 92%, at least 93%, at least 94%, at least 95%, at least 96%, at least 97%, at least 98%, or at least 99% sequence identity to the amino acid sequence of SEQ ID NO: 77, wherein the single domain antibody binds to plgR. In some embodiments, there is provided an isolated anti-plgR single domain antibody comprising a VHH domain having at least 75%, at least 80%, at least 85%, at least 90%, at least 91%, at least 92%, at least 93%, at least 94%, at least 95%, at least 96%, at least 97%, at least 98%, or at least 99% sequence identity to the amino acid sequence of SEQ ID NO: 78, wherein the single domain antibody binds to plgR. In some embodiments, there is provided an isolated anti-plgR single domain antibody comprising a VHH domain having at least 75%, at least 80%, at least 85%, at least 90%, at least 91%, at least 92%, at least 93%, at least 94%, at least 95%, at least 96%, at least 97%, at least 98%, or at least 99% sequence identity to the amino acid sequence of SEQ ID NO: 79, wherein the single domain antibody binds to plgR. In some embodiments, there is provided an isolated anti-plgR single domain antibody comprising a VHH domain having at least 75%, at least 80%, at least 85%, at least 90%, at least 91%, at least 92%, at least 93%, at least 94%, at least 95%, at least 96%, at least 97%, at least 98%, or at least 99% sequence identity to the amino acid sequence of SEQ ID NO: 80, wherein the single domain antibody binds to plgR. In some embodiments, there is provided an isolated anti-plgR single domain antibody comprising a VHH domain having at least 75%, at least 80%, at least 85%, at least 90%, at least 91%, at least 92%, at least 93%, at least 94%, at least 95%, at least 96%, at least 97%, at least 98%, or at least 99% sequence identity to the amino acid sequence of SEQ ID NO: 81, wherein the single domain antibody binds to plgR. In some embodiments, there is provided an isolated anti-plgR single domain antibody comprising a VHH domain having at least 75%, at least 80%, at least 85%, at least 90%, at least 91%, at least 92%, at least 93%, at least 94%, at least 95%, at least 96%, at least 97%, at least 98%, or at least 99% sequence identity to the amino acid sequence of SEQ ID NO: 82, wherein the single domain antibody binds to plgR. In some embodiments, there is provided an isolated anti-plgR single domain antibody comprising a VHH domain having at least 75%, at least 80%, at least 85%, at least 90%, at least 91%, at least 92%, at least 93%, at least 94%, at least 95%, at least 96%, at least 97%, at least 98%, or at least 99% sequence identity to the amino acid sequence of SEQ ID NO: 83, wherein the single domain antibody binds to plgR. In some embodiments, there is provided an isolated anti-plgR single domain antibody comprising a VHH domain having at least 75%, at least 80%, at least 85%, at least 90%, at least 91%, at least 92%, at least 93%, at least 94%, at least 95%, at least 96%, at least 97%, at least 98%, or at least 99% sequence identity to the amino acid sequence of SEQ ID NO: 84, wherein the single domain antibody binds to plgR. In some embodiments, there is provided an isolated anti-plgR single domain antibody comprising a VHH domain having at least 75%, at least 80%, at least 85%, at least 90%, at least 91%, at least 92%, at least 93%, at least 94%, at least 95%, at least 96%, at least 97%, at least 98%, or at least 99% sequence identity to the amino acid sequence of SEQ ID NO: 85, wherein the single domain antibody binds to plgR. In some embodiments, there is provided an isolated anti-plgR single domain antibody comprising a VHH domain having at least 75%, at least 80%, at least 85%, at least 90%, at least 91%, at least 92%, at least 93%, at least 94%, at least 95%, at least 96%, at least 97%, at least 98%, or at least 99% sequence identity to the amino acid sequence of SEQ ID NO: 86, wherein the single domain antibody binds to plgR. In some embodiments, there is provided an isolated anti-plgR single domain antibody comprising a VHH domain having at least 75%, at least 80%, at least 85%, at least 90%, at least 91%, at least 92%, at least 93%, at least 94%, at least 95%, at least 96%, at least 97%, at least 98%, or at least 99% sequence identity to the amino acid sequence of SEQ ID NO: 87, wherein the single domain antibody binds to plgR. In some embodiments, there is provided an isolated anti-plgR single domain antibody comprising a VHH domain having at least 75%, at least 80%, at least 85%, at least 90%, at least 91%, at least 92%, at least 93%, at least 94%, at least 95%, at least 96%, at least 97%, at least 98%, or at least 99% sequence identity to the amino acid sequence of SEQ ID NO: 88, wherein the single domain antibody binds to plgR. In some embodiments, there is provided an isolated anti-plgR single domain antibody comprising a VHH domain having at least 75%, at least 80%, at least 85%, at least 90%, at least 91%, at least 92%, at least 93%, at least 94%, at least 95%, at least 96%, at least 97%, at least 98%, or at least 99% sequence identity to the amino acid sequence of SEQ ID NO: 89, wherein the single domain antibody binds to plgR. In some embodiments, there is provided an isolated anti-plgR single domain antibody comprising a VHH domain having at least 75%, at least 80%, at least 85%, at least 90%, at least 91%, at least 92%, at least 93%, at least 94%, at least 95%, at least 96%, at least 97%, at least 98%, or at least 99% sequence identity to the amino acid sequence of SEQ ID NO: 90, wherein the single domain antibody binds to plgR. In some embodiments, there is provided an isolated anti-plgR single domain antibody comprising a VHH domain having at least 75%, at least 80%, at least 85%, at least 90%, at least 91%, at least 92%, at least 93%, at least 94%, at least 95%, at least 96%, at least 97%, at least 98%, or at least 99% sequence identity to the amino acid sequence of SEQ ID NO: 91, wherein the single domain antibody binds to plgR. In some embodiments, there is provided an isolated anti-plgR single domain antibody comprising a VHH domain having at least 75%, at least 80%, at least 85%, at least 90%, at least 91%, at least 92%, at least 93%, at least 94%, at least 95%, at least 96%, at least 97%, at least 98%, or at least 99% sequence identity to the amino acid sequence of SEQ ID NO: 92, wherein the single domain antibody binds to plgR. In some embodiments, there is provided an isolated anti-plgR single domain antibody comprising a VHH domain having at least 75%, at least 80%, at least 85%, at least 90%, at least 91%, at least 92%, at least 93%, at least 94%, at least 95%, at least 96%, at least 97%, at least 98%, or at least 99% sequence identity to the amino acid sequence of SEQ ID NO: 93, wherein the single domain antibody binds to plgR. In some embodiments, there is provided an isolated anti-plgR single domain antibody comprising a VHH domain having at least 75%, at least 80%, at least 85%, at least 90%, at least 91%, at least 92%, at least 93%, at least 94%, at least 95%, at least 96%, at least 97%, at least 98%, or at least 99% sequence identity to the amino acid sequence of SEQ ID NO: 94, wherein the single domain antibody binds to plgR. In some embodiments, there is provided an isolated anti-plgR single domain antibody comprising a VHH domain having at least 75%, at least 80%, at least 85%, at least 90%, at least 91%, at least 92%, at least 93%, at least 94%, at least 95%, at least 96%, at least 97%, at least 98%, or at least 99% sequence identity to the amino acid sequence of SEQ ID NO: 95, wherein the single domain antibody binds to plgR. In some embodiments, there is provided an isolated anti-plgR single domain antibody comprising a VHH domain having at least 75%, at least 80%, at least 85%, at least 90%, at least 91%, at least 92%, at least 93%, at least 94%, at least 95%, at least 96%, at least 97%, at least 98%, or at least 99% sequence identity to the amino acid sequence of SEQ ID NO: 96, wherein the single domain antibody binds to plgR. In some embodiments, there is provided an isolated anti-plgR single domain antibody comprising a VHH domain having at least 75%, at least 80%, at least 85%, at least 90%, at least 91%, at least 92%, at least 93%, at least 94%, at least 95%, at least 96%, at least 97%, at least 98%, or at least 99% sequence identity to the amino acid sequence of SEQ ID NO: 97, wherein the single domain antibody binds to plgR. In some embodiments, there is provided an isolated anti-plgR single domain antibody comprising a VHH domain having at least 75%, at least 80%, at least 85%, at least 90%, at least 91%, at least 92%, at least 93%, at least 94%, at least 95%, at least 96%, at least 97%, at least 98%, or at least 99% sequence identity to the amino acid sequence of SEQ ID NO: 98, wherein the single domain antibody binds to plgR. In some embodiments, there is provided an isolated anti-plgR single domain antibody comprising a VHH domain having at least 75%, at least 80%, at least 85%, at least 90%, at least 91%, at least 92%, at least 93%, at least 94%, at least 95%, at least 96%, at least 97%, at least 98%, or at least 99% sequence identity to the amino acid sequence of SEQ ID NO: 99, wherein the single domain antibody binds to plgR. In some embodiments, there is provided an isolated anti-plgR single domain antibody comprising a VHH domain having at least 75%, at least 80%, at least 85%, at least 90%, at least 91%, at least 92%, at least 93%, at least 94%, at least 95%, at least 96%, at least 97%, at least 98%, or at least 99% sequence identity to the amino acid sequence of SEQ ID NO: 100, wherein the single domain antibody binds to plgR. In some embodiments, there is provided an isolated anti-plgR single domain antibody comprising a VHH domain having at least 75%, at least 80%, at least 85%, at least 90%, at least 91%, at least 92%, at least 93%, at least 94%, at least 95%, at least 96%, at least 97%, at least 98%, or at least 99% sequence identity to the amino acid sequence of SEQ ID NO: 101, wherein the single domain antibody binds to plgR. In some embodiments, there is provided an isolated anti-plgR single domain antibody comprising a VHH domain having at least 75%, at least 80%, at least 85%, at least 90%, at least 91%, at least 92%, at least 93%, at least 94%, at least 95%, at least 96%, at least 97%, at least 98%, or at least 99% sequence identity to the amino acid sequence of SEQ ID NO: 102, wherein the single domain antibody binds to plgR. In some embodiments, there is provided an isolated anti-plgR single domain antibody comprising a VHH domain having at least 75%, at least 80%, at least 85%, at least 90%, at least 91%, at least 92%, at least 93%, at least 94%, at least 95%, at least 96%, at least 97%, at least 98%, or at least 99% sequence identity to the amino acid sequence of SEQ ID NO: 103, wherein the single domain antibody binds to plgR. In some embodiments, there is provided an isolated anti-plgR single domain antibody comprising a VHH domain having at least 75%, at least 80%, at least 85%, at least 90%, at least 91%, at least 92%, at least 93%, at least 94%, at least 95%, at least 96%, at least 97%, at least 98%, or at least 99% sequence identity to the amino acid sequence of SEQ ID NO: 104, wherein the single domain antibody binds to plgR. In some embodiments, there is provided an isolated anti-plgR single domain antibody comprising a VHH domain having at least 75%, at least 80%, at least 85%, at least 90%, at least 91%, at least 92%, at least 93%, at least 94%, at least 95%, at least 96%, at least 97%, at least 98%, or at least 99% sequence identity to the amino acid sequence of SEQ ID NO: 105, wherein the single domain antibody binds to plgR. In some embodiments, there is provided an isolated anti-plgR single domain antibody comprising a VHH domain having at least 75%, at least 80%, at least 85%, at least 90%, at least 91%, at least 92%, at least 93%, at least 94%, at least 95%, at least 96%, at least 97%, at least 98%, or at least 99% sequence identity to the amino acid sequence of SEQ ID NO: 106, wherein the single domain antibody binds to plgR. In some embodiments, there is provided an isolated anti-plgR single domain antibody comprising a VHH domain having at least 75%, at least 80%, at least 85%, at least 90%, at least 91%, at least 92%, at least 93%, at least 94%, at least 95%, at least 96%, at least 97%, at least 98%, or at least 99% sequence identity to the amino acid sequence of SEQ ID NO: 107, wherein the single domain antibody binds to plgR. In some embodiments, there is provided an isolated anti-plgR single domain antibody comprising a VHH domain having at least 75%, at least 80%, at least 85%, at least 90%, at least 91%, at least 92%, at least 93%, at least 94%, at least 95%, at least 96%, at least 97%, at least 98%, or at least 99% sequence identity to the amino acid sequence of SEQ ID NO: 108, wherein the single domain antibody binds to plgR. In some embodiments, there is provided an isolated anti-plgR single domain antibody comprising a VHH domain having at least 75%, at least 80%, at least 85%, at least 90%, at least 91%, at least 92%, at least 93%, at least 94%, at least 95%, at least 96%, at least 97%, at least 98%, or at least 99% sequence identity to the amino acid sequence of SEQ ID NO: 109, wherein the single domain antibody binds to plgR. In some embodiments, there is provided an isolated anti-plgR single domain antibody comprising a VHH domain having at least 75%, at least 80%, at least 85%, at least 90%, at least 91%, at least 92%, at least 93%, at least 94%, at least 95%, at least 96%, at least 97%, at least 98%, or at least 99% sequence identity to the amino acid sequence of SEQ ID NO: 110, wherein the single domain antibody binds to plgR. In some embodiments, there is provided an isolated anti-plgR single domain antibody comprising a VHH domain having at least 75%, at least 80%, at least 85%, at least 90%, at least 91%, at least 92%, at least 93%, at least 94%, at least 95%, at least 96%, at least 97%, at least 98%, or at least 99% sequence identity to the amino acid sequence of SEQ ID NO: 111, wherein the single domain antibody binds to plgR. In some embodiments, there is provided an isolated anti-plgR single domain antibody comprising a VHH domain having at least 75%, at least 80%, at least 85%, at least 90%, at least 91%, at least 92%, at least 93%, at least 94%, at least 95%, at least 96%, at least 97%, at least 98%, or at least 99% sequence identity to the amino acid sequence of SEQ ID NO: 112, wherein the single domain antibody binds to plgR. In some embodiments, there is provided an isolated anti-plgR single domain antibody comprising a VHH domain having at least 75%, at least 80%, at least 85%, at least 90%, at least 91%, at least 92%, at least 93%, at least 94%, at least 95%, at least 96%, at least 97%, at least 98%, or at least 99% sequence identity to the amino acid sequence of SEQ ID NO: 113, wherein the single domain antibody binds to plgR. In some embodiments, there is provided an isolated anti-plgR single domain antibody comprising a VHH domain having at least 75%, at least 80%, at least 85%, at least 90%, at least 91%, at least 92%, at least 93%, at least 94%, at least 95%, at least 96%, at least 97%, at least 98%, or at least 99% sequence identity to the amino acid sequence of SEQ ID NO: 114, wherein the single domain antibody binds to plgR. In some embodiments, there is provided an isolated anti-plgR single domain antibody comprising a VHH domain having at least 75%, at least 80%, at least 85%, at least 90%, at least 91%, at least 92%, at least 93%, at least 94%, at least 95%, at least 96%, at least 97%, at least 98%, or at least 99% sequence identity to the amino acid sequence of SEQ ID NO: 115, wherein the single domain antibody binds to plgR. In some embodiments, there is provided an isolated anti-plgR single domain antibody comprising a VHH domain having at least 75%, at least 80%, at least 85%, at least 90%, at least 91%, at least 92%, at least 93%, at least 94%, at least 95%, at least 96%, at least 97%, at least 98%, or at least 99% sequence identity to the amino acid sequence of SEQ ID NO: 116, wherein the single domain antibody binds to plgR. In some embodiments, there is provided an isolated anti-plgR single domain antibody comprising a VHH domain having at least 75%, at least 80%, at least 85%, at least 90%, at least 91%, at least 92%, at least 93%, at least 94%, at least 95%, at least 96%, at least 97%, at least 98%, or at least 99% sequence identity to the amino acid sequence of SEQ ID NO: 117, wherein the single domain antibody binds to plgR. In some embodiments, there is provided an isolated anti-plgR single domain antibody comprising a VHH domain having at least 75%, at least 80%, at least 85%, at least 90%, at least 91%, at least 92%, at least 93%, at least 94%, at least 95%, at least 96%, at least 97%, at least 98%, or at least 99% sequence identity to the amino acid sequence of SEQ ID NO: 118, wherein the single domain antibody binds to plgR. In some embodiments, there is provided an isolated anti-plgR single domain antibody comprising a VHH domain having at least 75%, at least 80%, at least 85%, at least 90%, at least 91%, at least 92%, at least 93%, at least 94%, at least 95%, at least 96%, at least 97%, at least 98%, or at least 99% sequence identity to the amino acid sequence of SEQ ID NO: 119, wherein the single domain antibody binds to plgR. In some embodiments, there is provided an isolated anti-plgR single domain antibody comprising a VHH domain having at least 75%, at least 80%, at least 85%, at least 90%, at least 91%, at least 92%, at least 93%, at least 94%, at least 95%, at least 96%, at least 97%, at least 98%, or at least 99% sequence identity to the amino acid sequence of SEQ ID NO: 120, wherein the single domain antibody binds to plgR. In some embodiments, there is provided an isolated anti-plgR single domain antibody comprising a VHH domain having at least 75%, at least 80%, at least 85%, at least 90%, at least 91%, at least 92%, at least 93%, at least 94%, at least 95%, at least 96%, at least 97%, at least 98%, or at least 99% sequence identity to the amino acid sequence of SEQ ID NO: 121, wherein the single domain antibody binds to plgR. In some embodiments, there is provided an isolated anti-plgR single domain antibody comprising a VHH domain having at least 75%, at least 80%, at least 85%, at least 90%, at least 91%, at least 92%, at least 93%, at least 94%, at least 95%, at least 96%, at least 97%, at least 98%, or at least 99% sequence identity to the amino acid sequence of SEQ ID NO: 122, wherein the single domain antibody binds to plgR.

[0427] In some embodiments, functional epitopes can be mapped, e.g., by combinatorial alanine scanning, to identify amino acids in the plgR protein that are necessary for interaction with anti-plgR single domain antibodies provided herein. In some embodiments, conformational and crystal structure of anti-plgR single domain antibody bound to plgR may be employed to identify the epitopes. In some embodiments, the present disclosure provides an antibody that specifically binds to the same epitope as any of the anti-plgR single domain antibodies provided herein. For example, in some embodiments, an antibody is provided that binds to the same epitope as an anti-plgR single domain antibody comprising the amino acid sequence of SEQ ID NO: 1. In some embodiments, an antibody is provided that binds to the same epitope as an anti-plgR single domain antibody comprising the amino acid sequence of SEQ ID NO: 2. In some embodiments, an antibody is provided that binds to the same epitope as an anti-plgR single domain antibody comprising the amino acid sequence of SEQ ID NO: 3. In some embodiments, an antibody is provided that binds to the same epitope as an anti-plgR single domain antibody comprising the amino acid sequence of SEQ ID NO: 4. In some embodiments, an antibody is provided that binds to the same epitope as an anti-plgR single domain antibody comprising the amino acid sequence of SEQ ID NO: 5. In some embodiments, an antibody is provided that binds to the same epitope as an anti-plgR single domain antibody comprising the amino acid sequence of SEQ ID NO: 6. In some embodiments, an antibody is provided that binds to the same epitope as an anti-plgR single domain antibody comprising the amino acid sequence of SEQ ID NO: 7. In some embodiments, an antibody is provided that binds to the same epitope as an anti-plgR single domain antibody comprising the amino acid sequence of SEQ ID NO: 8. In some embodiments, an antibody is provided that binds to the same epitope as an anti-plgR single domain antibody comprising the amino acid sequence of SEQ ID NO: 9. In some embodiments, an antibody is provided that binds to the same epitope as an anti-plgR single domain antibody comprising the amino acid sequence of SEQ ID NO: 10. In some embodiments, an antibody is provided that binds to the same epitope as an anti-plgR single domain antibody comprising the amino acid sequence of SEQ ID NO: 11. In some embodiments, an antibody is provided that binds to the same epitope as an anti-plgR single domain antibody comprising the amino acid sequence of SEQ ID NO: 12. In some embodiments, an antibody is provided that binds to the same epitope as an anti-plgR single domain antibody comprising the amino acid sequence of SEQ ID NO: 13. In some embodiments, an antibody is provided that binds to the same epitope as an anti-plgR single domain antibody comprising the amino acid sequence of SEQ ID NO: 14. In some embodiments, an antibody is provided that binds to the same epitope as an anti-plgR single domain antibody comprising the amino acid sequence of SEQ ID NO: 15. In some embodiments, an antibody is provided that binds to the same epitope as an anti-plgR single domain antibody comprising the amino acid sequence of SEQ ID NO: 16. In some embodiments, an antibody is provided that binds to the same epitope as an anti-plgR single domain antibody comprising the amino acid sequence of SEQ ID NO: 17. In some embodiments, an antibody is provided that binds to the same epitope as an anti-plgR single domain antibody comprising the amino acid sequence of SEQ ID NO: 18. In some embodiments, an antibody is provided that binds to the same epitope as an anti-plgR single domain antibody comprising the amino acid sequence of SEQ ID NO: 19. In some embodiments, an antibody is provided that binds to the same epitope as an anti-plgR single domain antibody comprising the amino acid sequence of SEQ ID NO: 20. In some embodiments, an antibody is provided that binds to the same epitope as an anti-plgR single domain antibody comprising the amino acid sequence of SEQ ID NO: 21. In some embodiments, an antibody is provided that binds to the same epitope as an anti-plgR single domain antibody comprising the amino acid sequence of SEQ ID NO: 22. In some embodiments, an antibody is provided that binds to the same epitope as an anti-plgR single domain antibody comprising the amino acid sequence of SEQ ID NO: 23. In some embodiments, an antibody is provided that binds to the same epitope as an anti-plgR single domain antibody comprising the amino acid sequence of SEQ ID NO: 24. In some embodiments, an antibody is provided that binds to the same epitope as an anti-plgR single domain antibody comprising the amino acid sequence of SEQ ID NO: 25. In some embodiments, an antibody is provided that binds to the same epitope as an anti-plgR single domain antibody comprising the amino acid sequence of SEQ ID NO: 26. In some embodiments, an antibody is provided that binds to the same epitope as an anti-plgR single domain antibody comprising the amino acid sequence of SEQ ID NO: 27. In some embodiments, an antibody is provided that binds to the same epitope as an anti-plgR single domain antibody comprising the amino acid sequence of SEQ ID NO: 28. In some embodiments, an antibody is provided that binds to the same epitope as an anti-plgR single domain antibody comprising the amino acid sequence of SEQ ID NO: 29. In some embodiments, an antibody is provided that binds to the same epitope as an anti-plgR single domain antibody comprising the amino acid sequence of SEQ ID NO: 30. In some embodiments, an antibody is provided that binds to the same epitope as an anti-plgR single domain antibody comprising the amino acid sequence of SEQ ID NO: 31. In some embodiments, an antibody is provided that binds to the same epitope as an anti-plgR single domain antibody comprising the amino acid sequence of SEQ ID NO: 32. In some embodiments, an antibody is provided that binds to the same epitope as an anti-plgR single domain antibody comprising the amino acid sequence of SEQ ID NO: 33. In some embodiments, an antibody is provided that binds to the same epitope as an anti-plgR single domain antibody comprising the amino acid sequence of SEQ ID NO: 34. In some embodiments, an antibody is provided that binds to the same epitope as an anti-plgR single domain antibody comprising the amino acid sequence of SEQ ID NO: 35. In some embodiments, an antibody is provided that binds to the same epitope as an anti-plgR single domain antibody comprising the amino acid sequence of SEQ ID NO: 36. In some embodiments, an antibody is provided that binds to the same epitope as an anti-plgR single domain antibody comprising the amino acid sequence of SEQ ID NO: 37. In some embodiments, an antibody is provided that binds to the same epitope as an anti-plgR single domain antibody comprising the amino acid sequence of SEQ ID NO: 38. In some embodiments, an antibody is provided that binds to the same epitope as an anti-plgR single domain antibody comprising the amino acid sequence of SEQ ID NO: 39. In some embodiments, an antibody is provided that binds to the same epitope as an anti-plgR single domain antibody comprising the amino acid sequence of SEQ ID NO: 40. In some embodiments, an antibody is provided that binds to the same epitope as an anti-plgR single domain antibody comprising the amino acid sequence of SEQ ID NO: 41. In some embodiments, an antibody is provided that binds to the same epitope as an anti-plgR single domain antibody comprising the amino acid sequence of SEQ ID NO: 42. In some embodiments, an antibody is provided that binds to the same epitope as an anti-plgR single domain antibody comprising the amino acid sequence of SEQ ID NO: 43. In some embodiments, an antibody is provided that binds to the same epitope as an anti-plgR single domain antibody comprising the amino acid sequence of SEQ ID NO: 44. In some embodiments, an antibody is provided that binds to the same epitope as an anti-plgR single domain antibody comprising the amino acid sequence of SEQ ID NO: 45. In some embodiments, an antibody is provided that binds to the same epitope as an anti-plgR single domain antibody comprising the amino acid sequence of SEQ ID NO: 46. In some embodiments, an antibody is provided that binds to the same epitope as an anti-plgR single domain antibody comprising the amino acid sequence of SEQ ID NO: 47. In some embodiments, an antibody is provided that binds to the same epitope as an anti-plgR single domain antibody comprising the amino acid sequence of SEQ ID NO: 48. In some embodiments, an antibody is provided that binds to the same epitope as an anti-plgR single domain antibody comprising the amino acid sequence of SEQ ID NO: 49. In some embodiments, an antibody is provided that binds to the same epitope as an anti-plgR single domain antibody comprising the amino acid sequence of SEQ ID NO: 50. In some embodiments, an antibody is provided that binds to the same epitope as an anti-plgR single domain antibody comprising the amino acid sequence of SEQ ID NO: 51. In some embodiments, an antibody is provided that binds to the same epitope as an anti-plgR single domain antibody comprising the amino acid sequence of SEQ ID NO: 52. In some embodiments, an antibody is provided that binds to the same epitope as an anti-plgR single domain antibody comprising the amino acid sequence of SEQ ID NO: 53. In some embodiments, an antibody is provided that binds to the same epitope as an anti-plgR single domain antibody comprising the amino acid sequence of SEQ ID NO: 54. In some embodiments, an antibody is provided that binds to the same epitope as an anti-plgR single domain antibody comprising the amino acid sequence of SEQ ID NO: 55. In some embodiments, an antibody is provided that binds to the same epitope as an anti-plgR single domain antibody comprising the amino acid sequence of SEQ ID NO: 56. In some embodiments, an antibody is provided that binds to the same epitope as an anti-plgR single domain antibody comprising the amino acid sequence of SEQ ID NO: 57. In some embodiments, an antibody is provided that binds to the same epitope as an anti-plgR single domain antibody comprising the amino acid sequence of SEQ ID NO: 58. In some embodiments, an antibody is provided that binds to the same epitope as an anti-plgR single domain antibody comprising the amino acid sequence of SEQ ID NO: 59. In some embodiments, an antibody is provided that binds to the same epitope as an anti-plgR single domain antibody comprising the amino acid sequence of SEQ ID NO: 60. In some embodiments, an antibody is provided that binds to the same epitope as an anti-plgR single domain antibody comprising the amino acid sequence of SEQ ID NO: 61. In some embodiments, an antibody is provided that binds to the same epitope as an anti-plgR single domain antibody comprising the amino acid sequence of SEQ ID NO: 62. In some embodiments, an antibody is provided that binds to the same epitope as an anti-plgR single domain antibody comprising the amino acid sequence of SEQ ID NO: 63. In some embodiments, an antibody is provided that binds to the same epitope as an anti-plgR single domain antibody comprising the amino acid sequence of SEQ ID NO: 64. In some embodiments, an antibody is provided that binds to the same epitope as an anti-plgR single domain antibody comprising the amino acid sequence of SEQ ID NO: 65. In some embodiments, an antibody is provided that binds to the same epitope as an anti-plgR single domain antibody comprising the amino acid sequence of SEQ ID NO: 66. In some embodiments, an antibody is provided that binds to the same epitope as an anti-plgR single domain antibody comprising the amino acid sequence of SEQ ID NO: 67. In some embodiments, an antibody is provided that binds to the same epitope as an anti-plgR single domain antibody comprising the amino acid sequence of SEQ ID NO: 68. In some embodiments, an antibody is provided that binds to the same epitope as an anti-plgR single domain antibody comprising the amino acid sequence of SEQ ID NO: 69. In some embodiments, an antibody is provided that binds to the same epitope as an anti-plgR single domain antibody comprising the amino acid sequence of SEQ ID NO: 70. In some embodiments, an antibody is provided that binds to the same epitope as an anti-plgR single domain antibody comprising the amino acid sequence of SEQ ID NO: 71. In some embodiments, an antibody is provided that binds to the same epitope as an anti-plgR single domain antibody comprising the amino acid sequence of SEQ ID NO: 72. In some embodiments, an antibody is provided that binds to the same epitope as an anti-plgR single domain antibody comprising the amino acid sequence of SEQ ID NO: 73. In some embodiments, an antibody is provided that binds to the same epitope as an anti-plgR single domain antibody comprising the amino acid sequence of SEQ ID NO: 74. In some embodiments, an antibody is provided that binds to the same epitope as an anti-plgR single domain antibody comprising the amino acid sequence of SEQ ID NO: 75. In some embodiments, an antibody is provided that binds to the same epitope as an anti-plgR single domain antibody comprising the amino acid sequence of SEQ ID NO: 76. In some embodiments, an antibody is provided that binds to the same epitope as an anti-plgR single domain antibody comprising the amino acid sequence of SEQ ID NO: 77. In some embodiments, an antibody is provided that binds to the same epitope as an anti-plgR single domain antibody comprising the amino acid sequence of SEQ ID NO: 78. In some embodiments, an antibody is provided that binds to the same epitope as an anti-plgR single domain antibody comprising the amino acid sequence of SEQ ID NO: 79. In some embodiments, an antibody is provided that binds to the same epitope as an anti-plgR single domain antibody comprising the amino acid sequence of SEQ ID NO: 80. In some embodiments, an antibody is provided that binds to the same epitope as an anti-plgR single domain antibody comprising the amino acid sequence of SEQ ID NO: 81. In some embodiments, an antibody is provided that binds to the same epitope as an anti-plgR single domain antibody comprising the amino acid sequence of SEQ ID NO: 82. In some embodiments, an antibody is provided that binds to the same epitope as an anti-plgR single domain antibody comprising the amino acid sequence of SEQ ID NO: 83. In some embodiments, an antibody is provided that binds to the same epitope as an anti-plgR single domain antibody comprising the amino acid sequence of SEQ ID NO: 84. In some embodiments, an antibody is provided that binds to the same epitope as an anti-plgR single domain antibody comprising the amino acid sequence of SEQ ID NO: 85. In some embodiments, an antibody is provided that binds to the same epitope as an anti-plgR single domain antibody comprising the amino acid sequence of SEQ ID NO: 86. In some embodiments, an antibody is provided that binds to the same epitope as an anti-plgR single domain antibody comprising the amino acid sequence of SEQ ID NO: 87. In some embodiments, an antibody is provided that binds to the same epitope as an anti-plgR single domain antibody comprising the amino acid sequence of SEQ ID NO: 88. In some embodiments, an antibody is provided that binds to the same epitope as an anti-plgR single domain antibody comprising the amino acid sequence of SEQ ID NO: 89. In some embodiments, an antibody is provided that binds to the same epitope as an anti-plgR single domain antibody comprising the amino acid sequence of SEQ ID NO: 90. In some embodiments, an antibody is provided that binds to the same epitope as an anti-plgR single domain antibody comprising the amino acid sequence of SEQ ID NO: 91. In some embodiments, an antibody is provided that binds to the same epitope as an anti-plgR single domain antibody comprising the amino acid sequence of SEQ ID NO: 92. In some embodiments, an antibody is provided that binds to the same epitope as an anti-plgR single domain antibody comprising the amino acid sequence of SEQ ID NO: 93. In some embodiments, an antibody is provided that binds to the same epitope as an anti-plgR single domain antibody comprising the amino acid sequence of SEQ ID NO: 94. In some embodiments, an antibody is provided that binds to the same epitope as an anti-plgR single domain antibody comprising the amino acid sequence of SEQ ID NO: 95. In some embodiments, an antibody is provided that binds to the same epitope as an anti-plgR single domain antibody comprising the amino acid sequence of SEQ ID NO: 96. In some embodiments, an antibody is provided that binds to the same epitope as an anti-plgR single domain antibody comprising the amino acid sequence of SEQ ID NO: 97. In some embodiments, an antibody is provided that binds to the same epitope as an anti-plgR single domain antibody comprising the amino acid sequence of SEQ ID NO: 98. In some embodiments, an antibody is provided that binds to the same epitope as an anti-plgR single domain antibody comprising the amino acid sequence of SEQ ID NO: 99. In some embodiments, an antibody is provided that binds to the same epitope as an anti-plgR single domain antibody comprising the amino acid sequence of SEQ ID NO: 100. In some embodiments, an antibody is provided that binds to the same epitope as an anti-plgR single domain antibody comprising the amino acid sequence of SEQ ID NO: 101. In some embodiments, an antibody is provided that binds to the same epitope as an anti-plgR single domain antibody comprising the amino acid sequence of SEQ ID NO: 102. In some embodiments, an antibody is provided that binds to the same epitope as an anti-plgR single domain antibody comprising the amino acid sequence of SEQ ID NO: 103. In some embodiments, an antibody is provided that binds to the same epitope as an anti-plgR single domain antibody comprising the amino acid sequence of SEQ ID NO: 104. In some embodiments, an antibody is provided that binds to the same epitope as an anti-plgR single domain antibody comprising the amino acid sequence of SEQ ID NO: 105. In some embodiments, an antibody is provided that binds to the same epitope as an anti-plgR single domain antibody comprising the amino acid sequence of SEQ ID NO: 106. In some embodiments, an antibody is provided that binds to the same epitope as an anti-plgR single domain antibody comprising the amino acid sequence of SEQ ID NO: 107. In some embodiments, an antibody is provided that binds to the same epitope as an anti-plgR single domain antibody comprising the amino acid sequence of SEQ ID NO: 108. In some embodiments, an antibody is provided that binds to the same epitope as an anti-plgR single domain antibody comprising the amino acid sequence of SEQ ID NO: 109. In some embodiments, an antibody is provided that binds to the same epitope as an anti-plgR single domain antibody comprising the amino acid sequence of SEQ ID NO: 110. In some embodiments, an antibody is provided that binds to the same epitope as an anti-plgR single domain antibody comprising the amino acid sequence of SEQ ID NO: 111. In some embodiments, an antibody is provided that binds to the same epitope as an anti-plgR single domain antibody comprising the amino acid sequence of SEQ ID NO: 112. In some embodiments, an antibody is provided that binds to the same epitope as an anti-plgR single domain antibody comprising the amino acid sequence of SEQ ID NO: 113. In some embodiments, an antibody is provided that binds to the same epitope as an anti-plgR single domain antibody comprising the amino acid sequence of SEQ ID NO: 114. In some embodiments, an antibody is provided that binds to the same epitope as an anti-plgR single domain antibody comprising the amino acid sequence of SEQ ID NO: 115. In some embodiments, an antibody is provided that binds to the same epitope as an anti-plgR single domain antibody comprising the amino acid sequence of SEQ ID NO: 116. In some embodiments, an antibody is provided that binds to the same epitope as an anti-plgR single domain antibody comprising the amino acid sequence of SEQ ID NO: 117. In some embodiments, an antibody is provided that binds to the same epitope as an anti-plgR single domain antibody comprising the amino acid sequence of SEQ ID NO: 118. In some embodiments, an antibody is provided that binds to the same epitope as an anti-plgR single domain antibody comprising the amino acid sequence of SEQ ID NO: 119. In some embodiments, an antibody is provided that binds to the same epitope as an anti-plgR single domain antibody comprising the amino acid sequence of SEQ ID NO: 120. In some embodiments, an antibody is provided that binds to the same epitope as an anti-plgR single domain antibody comprising the amino acid sequence of SEQ ID NO: 121. In some embodiments, an antibody is provided that binds to the same epitope as an anti-plgR single domain antibody comprising the amino acid sequence of SEQ ID NO: 122.

[0428] In some embodiments, provided herein is a plgR binding protein comprising any one of the anti-plgR single domain antibodies described above. In some embodiments, the plgR binding protein is a monoclonal antibody, including a camelid, chimeric, humanized or human antibody. In some embodiments, the anti-plgR antibody is an antibody fragment, e.g., a VHH fragment. In some embodiments, the anti-plgR antibody is a full-length heavy-chain only antibody comprising an Fc region of any antibody class or isotype, such as IgG1 or IgG4. In some embodiments, the Fc region has reduced or minimized effector function. In some embodiments, the plgR binding protein is a fusion protein comprising the anti-plgR single domain antibody provided herein. In other embodiments, the plgR binding protein is a multispecific antibody comprising the anti-plgR single domain antibody provided herein. Other exemplary plgR binding molecules are described in more detail in the following sections.

[0429] In some embodiments, the anti-plgR antibody (such as anti-plgR single domain antibody) or antigen binding protein according to any of the above embodiments may incorporate any of the features, singly or in combination, as described in Sections 5.2.2 to 5.2.6 below.

[0430] 5.2.2. Humanized Single Domain Antibodies

[0431] The single domain antibodies described herein include humanized single domain antibodies. General strategies to humanize single domain antibodies from Camelidae species have been described (see, e.g., Vincke et al., J. Biol. Chem., 2009, 284(5):3273-3284) and are useful for producing humanized VHH domains as disclosed herein. The design of humanized single domain antibodies from Camelidae species may include the hallmark residues in the VHH, such as residues 11, 37, 44, 45 and 47 (residue numbering according to Kabat) (Muyldermans, Reviews Mol Biotech 74:277-302 (2001).

[0432] Humanized antibodies, such as the humanized single domain antibodies disclosed herein can also be produced using a variety of techniques known in the art, including but not limited to, CDR-grafting (European Patent No. EP 239,400; International publication No. WO 91/09967; and U.S. Pat. Nos. 5,225,539, 5,530,101, and 5,585,089), veneering or resurfacing (European Patent Nos. EP 592,106 and EP 519,596; Padlan, 1991, Molecular Immunology 28(4/5):489-498; Studnicka et al., 1994, Protein Engineering 7(6):805-814; and Roguska et al., 1994, PNAS 91:969-973), chain shuffling (U.S. Pat. No. 5,565,332), and techniques disclosed in, e.g., U.S. Pat. Nos. 6,407,213, 5,766,886, WO 9317105, Tan et al., J. Immunol. 169:1119 25 (2002), Caldas et al., Protein Eng. 13(5):353-60 (2000), Morea et al., Methods 20(3):267 79 (2000), Baca et al., J. Biol. Chem. 272(16):10678-84 (1997), Roguska et al., Protein Eng. 9(10):895 904 (1996), Couto et al., Cancer Res. 55 (23 Supp):5973s-5977s (1995), Couto et al., Cancer Res. 55(8):1717-22 (1995), Sandhu J S, Gene 150(2):409-10 (1994), and Pedersen et al., J. Mol. Biol. 235(3):959-73 (1994). See also U.S. Patent Pub. No. US 2005/0042664 A1 (Feb. 24, 2005), each of which is incorporated by reference herein in its entirety.

[0433] In some embodiments, single domain antibodies provided herein can be humanized single domain antibodies that bind to pIgR, including human pIgR. For example, humanized single chain antibodies of the present disclosure may comprise one or more CDRs in SEQ ID NOs: 1 to 122. Various methods for humanizing non-human antibodies are known in the art. For example, a humanized antibody can have one or more amino acid residues introduced into it from a source that is non-human. These non-human amino acid residues are often referred to as “import” residues, which are typically taken from an “import” variable domain. Humanization may be performed, for example, following the method of Jones et al., 1986, Nature 321:522-25; Riechmann et al., 1988, Nature 332:323-27; and Verhoeyen et al., 1988, Science 239:1534-36), by substituting hypervariable region sequences for the corresponding sequences of a human antibody.

[0434] In some cases, the humanized antibodies are constructed by CDR grafting, in which the amino acid sequences of the CDRs of the parent non-human antibody are grafted onto a human antibody framework. For example, Padlan et al. determined that only about one third of the residues in the CDRs actually contact the antigen, and termed these the “specificity determining residues,” or SDRs (Padlan et al., 1995, FASEB J. 9:133-39). In the technique of SDR grafting, only the SDR residues are grafted onto the human antibody framework (see, e.g., Kashmiri et al., 2005, Methods 36:25-34).

[0435] The choice of human variable domains to be used in making the humanized antibodies can be important to reduce antigenicity. For example, according to the so-called “best-fit” method, the sequence of the variable domain of a non-human antibody is screened against the entire library of known human variable-domain sequences. The human sequence that is closest to that of the non-human antibody may be selected as the human framework for the humanized antibody (Sims et al., 1993, J. Immunol. 151:2296-308; and Chothia et al., 1987, J. Mol. Biol. 196:901-17). Another method uses a particular framework derived from the consensus sequence of all human antibodies of a particular subgroup of light or heavy chains. The same framework may be used for several different humanized antibodies (Carter et al., 1992, Proc. Natl. Acad. Sci. USA 89:4285-89; and Presta et al., 1993, J. Immunol. 151:2623-32). In some cases, the framework is derived from the consensus sequences of the most abundant human subclasses, V_{L}6 subgroup I (V_{L}6I) and V_{H} subgroup III (V_{H}III). In another method, human germline genes are used as the source of the framework regions.

[0436] In an alternative paradigm based on comparison of CDRs, called superhumanization, FR homology is irrelevant. The method consists of comparison of the non-human sequence with the functional human germline gene repertoire. Those genes encoding the same or closely related canonical structures to the murine sequences are then selected. Next, within the genes sharing the canonical structures with the non-human antibody, those with highest homology within the CDRs are chosen as FR donors. Finally, the non-human CDRs are grafted onto these FRs (see, e.g., Tan et al., 2002, J. Immunol. 169:1119-25).

[0437] It is further generally desirable that antibodies be humanized with retention of their affinity for the antigen and other favorable biological properties. To achieve this goal, according to one method, humanized antibodies are prepared by a process of analysis of the parental sequences and various conceptual humanized products using three-dimensional models of the parental and humanized sequences. Three-dimensional immunoglobulin models are commonly available and are familiar to those skilled in the art. Computer programs are available which illustrate and display probable three-dimensional conformational structures of selected candidate immunoglobulin sequences. These include, for example, WAM (Whitelegg and Rees, 2000, Protein Eng. 13:819-24), Modeller (Sali and Blundell, 1993, J. Mol. Biol. 234:779-815), and Swiss PDB Viewer (Guex and Peitsch, 1997, Electrophoresis 18:2714-23). Inspection of these displays permits analysis of the likely role of the residues in the functioning of the candidate immunoglobulin sequence, e.g., the analysis of residues that influence the ability of the candidate immunoglobulin to bind its antigen. In this way, FR residues can be selected and combined from the recipient and import sequences so that the desired antibody characteristic, such as increased affinity for the target antigen(s), is achieved. In general, the hypervariable region residues are directly and most substantially involved in influencing antigen binding.

[0438] Another method for antibody humanization is based on a metric of antibody humanness termed Human String Content (HSC). This method compares the mouse sequence with the repertoire of human germline genes, and the differences are scored as HSC. The target sequence is then humanized by maximizing its HSC rather than using a global identity measure to generate multiple diverse humanized variants (Lazar et al., 2007, Mol. Immunol. 44:1986-98).

[0439] In addition to the methods described above, empirical methods may be used to generate and select humanized antibodies. These methods include those that are based upon the generation of large libraries of humanized variants and selection of the best clones using enrichment technologies or high throughput screening techniques. Antibody variants may be isolated from phage, ribosome, and yeast display libraries as well as by bacterial colony screening (see, e.g., Hoogenboom, 2005, Nat. Biotechnol. 23:1105-16; Dufner et al., 2006, Trends Biotechnol. 24:523-29; Feldhaus et al., 2003, Nat. Biotechnol. 21:163-70; and Schlapschy et al., 2004, Protein Eng. Des. Sel. 17:847-60).

[0440] In the FR library approach, a collection of residue variants are introduced at specific positions in the FR followed by screening of the library to select the FR that best supports the grafted CDR. The residues to be substituted may include some or all of the “Vernier” residues identified as potentially contributing to CDR structure (see, e.g., Foote and Winter, 1992, J. Mol. Biol. 224:487-99), or from the more limited set of target residues identified by Baca et al. (1997, J. Biol. Chem. 272:10678-84).

[0441] In FR shuffling, whole FRs are combined with the non-human CDRs instead of creating combinatorial libraries of selected residue variants (see, e.g., Dall'Acqua et al., 2005, Methods 36:43-60). A one-step FR shuffling process may be used. Such a process has been shown to be efficient, as the resulting antibodies exhibited improved biochemical and physicochemical properties including enhanced expression, increased affinity, and thermal stability (see, e.g., Damschroder et al., 2007, Mol. Immunol. 44:3049-60).

[0442] The “humaneering” method is based on experimental identification of essential minimum specificity determinants (MSDs) and is based on sequential replacement of non-human fragments into libraries of human FRs and assessment of binding. This methodology typically results in epitope retention and identification of antibodies from multiple subclasses with distinct human V-segment CDRs.

[0443] The “human engineering” method involves altering a non-human antibody or antibody fragment by making specific changes to the amino acid sequence of the antibody so as to produce a modified antibody with reduced immunogenicity in a human that nonetheless retains the desirable binding properties of the original non-human antibodies. Generally, the technique involves classifying amino acid residues of a non-human antibody as “low risk,” “moderate risk,” or “high risk” residues. The classification is performed using a global risk/reward calculation that evaluates the predicted benefits of making particular substitution (e.g., for immunogenicity in humans) against the risk that the substitution will affect the resulting antibody's folding. The particular human amino acid residue to be substituted at a given position (e.g., low or moderate risk) of a non-human antibody sequence can be selected by aligning an amino acid sequence from the non-human antibody's variable regions with the corresponding region of a specific or consensus human antibody sequence. The amino acid residues at low or moderate risk positions in the non-human sequence can be substituted for the corresponding residues in the human antibody sequence according to the alignment. Techniques for making human engineered proteins are described in greater detail in Studnicka et al., 1994, Protein Engineering 7:805-14; U.S. Pat. Nos. 5,766,886; 5,770,196; 5,821,123; and 5,869,619; and PCT Publication WO 93/11794.

[0444] A composite human antibody can be generated using, for example, Composite Human Antibody™ technology (Antitope Ltd., Cambridge, United Kingdom). To generate composite human antibodies, variable region sequences are designed from fragments of multiple human antibody variable region sequences in a manner that avoids T cell epitopes, thereby minimizing the immunogenicity of the resulting antibody.

[0445] A deimmunized antibody is an antibody in which T-cell epitopes have been removed. Methods for making deimmunized antibodies have been described. See, e.g., Jones et al., Methods Mol Biol. 2009; 525:405-23, xiv, and De Groot et al., Cell. Immunol. 244:148-153(2006)). Deimmunized antibodies comprise T-cell epitope-depleted variable regions and human constant regions. Briefly, variable regions of an antibody are cloned and T-cell epitopes are subsequently identified by testing overlapping peptides derived from the variable regions of the antibody in a T cell proliferation assay. T cell epitopes are identified via in silico methods to identify peptide binding to human MHC class II. Mutations are introduced in the variable regions to abrogate binding to human MHC class II. Mutated variable regions are then utilized to generate the deimmunized antibody.

[0446] 5.2.3. Single Domain Antibody Variants

[0447] In some embodiments, amino acid sequence modification(s) of the single domain antibodies that bind to pIgR described herein are contemplated. For example, it may be desirable to optimize the binding affinity and/or other biological properties of the antibody, including but not limited to specificity, thermostability, expression level, effector functions, glycosylation, reduced immunogenicity, or solubility. Thus, in addition to the single domain antibodies that bind to pIgR described herein, it is contemplated that variants of the single domain antibodies that bind to pIgR described herein can be prepared. For example, single domain antibody variants can be prepared by introducing appropriate nucleotide changes into the encoding DNA, and/or by synthesis of the desired antibody or polypeptide. Those skilled in the art who appreciate that amino acid changes may alter post-translational processes of the single domain antibody.

[0448] In some embodiments, the single domain antibodies provided herein are chemically modified, for example, by the covalent attachment of any type of molecule to the single domain antibody. The antibody derivatives may include antibodies that have been chemically modified, for example, by glycosylation, acetylation, pegylation, phosphorylation, amidation, derivatization by known protecting/blocking groups, proteolytic cleavage, linkage to a cellular ligand or other protein, or conjugation to one or more immunoglobulin domains (e.g., Fc or a portion of an Fc). Any of numerous chemical modifications may be carried out by known techniques, including, but not limited to, specific chemical cleavage, acetylation, formulation, metabolic synthesis of tunicamycin, etc. Additionally, the antibody may contain one or more non-classical amino acids.

[0449] Variations may be a substitution, deletion, or insertion of one or more codons encoding the single domain antibody or polypeptide that results in a change in the amino acid sequence as compared with the original antibody or polypeptide. Amino acid substitutions can be the result of replacing one amino acid with another amino acid having similar structural and/or chemical properties, such as the replacement of a leucine with a serine, e.g., conservative amino acid replacements. Standard techniques known to those of skill in the art can be used to introduce mutations in the nucleotide sequence encoding a molecule provided herein, including, for example, site-directed mutagenesis and PCR-mediated mutagenesis which results in amino acid substitutions. Insertions or deletions may optionally be in the range of about 1 to 5 amino acids. In certain embodiments, the substitution, deletion, or insertion includes fewer than 25 amino acid substitutions, fewer than 20 amino acid substitutions, fewer than 15 amino acid substitutions, fewer than 10 amino acid substitutions, fewer than 5 amino acid substitutions, fewer than 4 amino acid substitutions, fewer than 3 amino acid substitutions, or fewer than 2 amino acid substitutions relative to the original molecule. In a specific embodiment, the substitution is a conservative amino acid substitution made at one or more predicted non-essential amino acid residues. The variation allowed may be determined by systematically making insertions, deletions, or substitutions of amino acids in the sequence and testing the resulting variants for activity exhibited by the parental antibodies.

[0450] Amino acid sequence insertions include amino- and/or carboxyl-terminal fusions ranging in length from one residue to polypeptides containing multiple residues, as well as intrasequence insertions of single or multiple amino acid residues. Examples of terminal insertions include an antibody with an N-terminal methionyl residue.

[0451] Single domain antibodies generated by conservative amino acid substitutions are included in the present disclosure. In a conservative amino acid substitution, an amino acid residue is replaced with an amino acid residue having a side chain with a similar charge. As described above, families of amino acid residues having side chains with similar charges have been defined in the art. These families include amino acids with basic side chains (e.g., lysine, arginine, histidine), acidic side chains (e.g., aspartic acid, glutamic acid), uncharged polar side chains (e.g., glycine, asparagine, glutamine, serine, threonine, tyrosine, cysteine), nonpolar side chains (e.g., alanine, valine, leucine, isoleucine, proline, phenylalanine, methionine, tryptophan), beta-branched side chains (e.g., threonine, valine, isoleucine) and aromatic side chains (e.g., tyrosine, phenylalanine, tryptophan, histidine). Alternatively, mutations can be introduced randomly along all or part of the coding sequence, such as by saturation mutagenesis, and the resultant mutants can be screened for biological activity to identify mutants that retain activity. Following mutagenesis, the encoded protein can be expressed and the activity of the protein can be determined. conservative (e.g., within an amino acid group with similar properties and/or side chains) substitutions may be made, so as to maintain or not significantly change the properties.

[0452] Amino acids may be grouped according to similarities in the properties of their side chains (see, e.g., Lehninger, Biochemistry 73-75 (2d ed. 1975)): (1) non-polar: Ala (A), Val (V), Leu (L), Ile (I), Pro (P), Phe (F), Trp (W), Met (M); (2) uncharged polar: Gly (G), Ser (S), Thr (T), Cys (C), Tyr (Y), Asn (N), Gln (Q); (3) acidic: Asp (D), Glu (E); and (4) basic: Lys (K), Arg (R), His (H). Alternatively, naturally occurring residues may be divided into groups based on common side-chain properties: (1) hydrophobic: Norleucine, Met, Ala, Val, Leu, Ile; (2) neutral hydrophilic: Cys, Ser, Thr, Asn, Gln; (3) acidic: Asp, Glu; (4) basic: His, Lys, Arg; (5) residues that influence chain orientation: Gly, Pro; and (6) aromatic: Trp, Tyr, Phe.

[0453] For example, any cysteine residue not involved in maintaining the proper conformation of the single domain antibody also may be substituted, for example, with another amino acid, such as alanine or serine, to improve the oxidative stability of the molecule and to prevent aberrant crosslinking.

[0454] The variations can be made using methods known in the art such as oligonucleotide-mediated (site-directed) mutagenesis, alanine scanning, and PCR mutagenesis. Site-directed mutagenesis (see, e.g., Carter, 1986, Biochem J. 237:1-7; and Zoller et al., 1982, Nucl. Acids Res. 10:6487-500), cassette mutagenesis (see, e.g., Wells et al., 1985, Gene 34:315-23), or other known techniques can be performed on the cloned DNA to produce the single domain antibody variant DNA.

[0455] 5.2.4. In Vitro Affinity Maturation

[0456] In some embodiments, antibody variants having an improved property such as affinity, stability, or expression level as compared to a parent antibody may be prepared by in vitro affinity maturation. Like the natural prototype, in vitro affinity maturation is based on the principles of mutation and selection. Libraries of antibodies are displayed on the surface of an organism (e.g., phage, bacteria, yeast, or mammalian cell) or in association (e.g., covalently or non-covalently) with their encoding mRNA or DNA. Affinity selection of the displayed antibodies allows isolation of organisms or complexes carrying the genetic information encoding the antibodies. Two or three rounds of mutation and selection using display methods such as phage display usually results in antibody fragments with affinities in the low nanomolar range. Affinity matured antibodies can have nanomolar or even picomolar affinities for the target antigen.

[0457] Phage display is a widespread method for display and selection of antibodies. The antibodies are displayed on the surface of Fd or M13 bacteriophages as fusions to the bacteriophage coat protein. Selection involves exposure to antigen to allow phage-displayed antibodies to bind their targets, a process referred to as “panning.” Phage bound to antigen are recovered and used to infect bacteria to produce phage for further rounds of selection. For review, see, for example, Hoogenboom, 2002, Methods. Mol. Biol. 178:1-37; and Bradbury and Marks, 2004, J. Immunol. Methods 290:29-49.

[0458] In a yeast display system (see, e.g., Boder et al., 1997, Nat. Biotech. 15:553-57; and Chao et al., 2006, Nat. Protocols 1:755-68), the antibody may be fused to the adhesion subunit of the yeast agglutinin protein Aga2p, which attaches to the yeast cell wall through disulfide bonds to Aga1p. Display of a protein via Aga2p projects the protein away from the cell surface, minimizing potential interactions with other molecules on the yeast cell wall. Magnetic separation and flow cytometry are used to screen the library to select for antibodies with improved affinity or stability. Binding to a soluble antigen of interest is determined by labeling of yeast with biotinylated antigen and a secondary reagent such as streptavidin conjugated to a fluorophore. Variations in surface expression of the antibody can be measured through immunofluorescence labeling of either the hemagglutinin or c-Myc epitope tag flanking the single chain antibody (e.g., scFv). Expression has been shown to correlate with the stability of the displayed protein, and thus antibodies can be selected for improved stability as well as affinity (see, e.g., Shusta et al., 1999, J. Mol. Biol. 292:949-56). An additional advantage of yeast display is that displayed proteins are folded in the endoplasmic reticulum of the eukaryotic yeast cells, taking advantage of endoplasmic reticulum chaperones and quality-control machinery. Once maturation is complete, antibody affinity can be conveniently “titrated” while displayed on the surface of the yeast, eliminating the need for expression and purification of each clone. A theoretical limitation of yeast surface display is the potentially smaller functional library size than that of other display methods; however, a recent approach uses the yeast cells' mating system to create combinatorial diversity estimated to be 10¹⁴ in size (see, e.g., U.S. Pat. Publication 2003/0186374; and Blaise et al., 2004, Gene 342:211-18).

[0459] In ribosome display, antibody-ribosome-mRNA (ARM) complexes are generated for selection in a cell-free system. The DNA library coding for a particular library of antibodies is genetically fused to a spacer sequence lacking a stop codon. This spacer sequence, when translated, is still attached to the peptidyl tRNA and occupies the ribosomal tunnel, and thus allows the protein of interest to protrude out of the ribosome and fold. The resulting complex of mRNA, ribosome, and protein can bind to surface-bound ligand, allowing simultaneous isolation of the antibody and its encoding mRNA through affinity capture with the ligand. The ribosome-bound mRNA is then reverse transcribed back into cDNA, which can then undergo mutagenesis and be used in the next round of selection (see, e.g., Fukuda et al., 2006, Nucleic Acids Res. 34:e127). In mRNA display, a covalent bond between antibody and mRNA is established using puromycin as an adaptor molecule (Wilson et al., 2001, Proc. Natl. Acad. Sci. USA 98:3750-55).

[0460] As these methods are performed entirely in vitro, they provide two main advantages over other selection technologies. First, the diversity of the library is not limited by the transformation efficiency of bacterial cells, but only by the number of ribosomes and different mRNA molecules present in the test tube. Second, random mutations can be introduced easily after each selection round, for example, by non-proofreading polymerases, as no library must be transformed after any diversification step.

[0461] In some embodiments, mammalian display systems may be used.

[0462] Diversity may also be introduced into the CDRs of the antibody libraries in a targeted manner or via random introduction. The former approach includes sequentially targeting all the CDRs of an antibody via a high or low level of mutagenesis or targeting isolated hot spots of somatic hypermutations (see, e.g., Ho et al., 2005, J. Biol. Chem. 280:607-17) or residues suspected of affecting affinity on experimental basis or structural reasons. Diversity may also be introduced by replacement of regions that are naturally diverse via DNA shuffling or similar techniques (see, e.g., Lu et al., 2003, J. Biol. Chem. 278:43496-507; U.S. Pat. Nos. 5,565,332 and 6,989,250). Alternative techniques target hypervariable loops extending into framework-region residues (see, e.g., Bond et al., 2005, J. Mol. Biol. 348:699-709) employ loop deletions and insertions in CDRs or use hybridization-based diversification (see, e.g., U.S. Pat. Publication No. 2004/0005709). Additional methods of generating diversity in CDRs are disclosed, for example, in U.S. Pat. No. 7,985,840. Further methods that can be used to generate antibody libraries and/or antibody affinity maturation are disclosed, e.g., in U.S. Pat. Nos. 8,685,897 and 8,603,930, and U.S. Publ. Nos. 2014/0170705, 2014/0094392, 2012/0028301, 2011/0183855, and 2009/0075378, each of which are incorporated herein by reference.

[0463] Screening of the libraries can be accomplished by various techniques known in the art. For example, single domain antibodies can be immobilized onto solid supports, columns, pins, or cellulose/poly(vinylidene fluoride) membranes/other filters, expressed on host cells affixed to adsorption plates or used in cell sorting, or conjugated to biotin for capture with streptavidin-coated beads or used in any other method for panning display libraries.

[0464] For review of in vitro affinity maturation methods, see, e.g., Hoogenboom, 2005, Nature Biotechnology 23:1105-16; Quiroz and Sinclair, 2010, Revista Ingeneria Biomedia 4:39-51; and references therein.

[0465] 5.2.5. Modifications of Single Domain Antibodies

[0466] Covalent modifications of single domain antibodies are included within the scope of the present disclosure. Covalent modifications include reacting targeted amino acid residues of a single domain antibody with an organic derivatizing agent that is capable of reacting with selected side chains or the N- or C-terminal residues of the single domain antibody. Other modifications include deamidation of glutaminyl and asparaginyl residues to the corresponding glutamyl and aspartyl residues, respectively, hydroxylation of proline and lysine, phosphorylation of hydroxyl groups of seryl or threonyl residues, methylation of the α-amino groups of lysine, arginine, and histidine side chains (see, e.g., Creighton, Proteins: Structure and Molecular Properties 79-86 (1983)), acetylation of the N-terminal amine, and amidation of any C-terminal carboxyl group.

[0467] Other types of covalent modification of the single domain antibody included within the scope of this present disclosure include altering the native glycosylation pattern of the antibody or polypeptide (see, e.g., Beck et al., 2008, Curr. Pharm. Biotechnol. 9:482-501; and Walsh, 2010, Drug Discov. Today 15:773-80), and linking the antibody to one of a variety of nonproteinaceous polymers, e.g., polyethylene glycol (PEG), polypropylene glycol, or polyoxyalkylenes, in the manner set forth, for example, in U.S. Pat. Nos. 4,640,835; 4,496,689; 4,301,144; 4,670,417; 4,791,192; or 4,179,337. The single domain antibody that binds to pIgR of the disclosure may also be genetically fused or conjugated to one or more immunoglobulin constant regions or portions thereof (e.g., Fc) to extend half-life and/or to impart known Fc-mediated effector functions.

[0468] The single chain antibody that binds to pIgR of the present disclosure may also be modified to form chimeric molecules comprising the single chain antibody that binds to pIgR fused to another, heterologous polypeptide or amino acid sequence, for example, an epitope tag (see, e.g., Terpe, 2003, Appl. Microbiol. Biotechnol. 60:523-33) or the Fc region of an IgG molecule (see, e.g., Aruffo, Antibody Fusion Proteins 221-42 (Chamow and Ashkenazi eds., 1999)). The single chain antibody that binds to pIgR may also be used to generate pIgR binding chimeric antigen receptor (CAR).

[0469] Also provided herein are fusion proteins comprising the single chain antibody that binds to pIgR of the disclosure and a heterologous polypeptide. In some embodiments, the heterologous polypeptide to which the antibody is genetically fused or chemically conjugated is useful for targeting the antibody to cells having cell surface-expressed pIgR.

[0470] Also provided herein are panels of antibodies that bind to an pIgR antigen. In specific embodiments, the panels of antibodies have different association rates, different dissociation rates, different affinities for an pIgR antigen, and/or different specificities for an pIgR antigen. In some embodiments, the panels comprise or consist of about 10, about 25, about 50, about 75, about 100, about 125, about 150, about 175, about 200, about 250, about 300, about 350, about 400, about 450, about 500, about 550, about 600, about 650, about 700, about 750, about 800, about 850, about 900, about 950, or about 1000 antibodies or more. Panels of antibodies can be used, for example, in 96-well or 384-well plates, for assays such as ELISAs.

[0471] 5.2.6. Preparation of Single Domain Antibodies

[0472] Single domain antibodies provided herein may be produced by culturing cells transformed or transfected with a vector containing a single domain antibody-encoding nucleic acids. Polynucleotide sequences encoding polypeptide components of the antibody of the present disclosure can be obtained using standard recombinant techniques. Desired polynucleotide sequences may be isolated and sequenced from antibody producing cells such as hybridomas cells or B cells. Alternatively, polynucleotides can be synthesized using nucleotide synthesizer or PCR techniques. Once obtained, sequences encoding the polypeptides are inserted into a recombinant vector capable of replicating and expressing heterologous polynucleotides in host cells. Many vectors that are available and known in the art can be used for the purpose of the present disclosure. Selection of an appropriate vector will depend mainly on the size of the nucleic acids to be inserted into the vector and the particular host cell to be transformed with the vector. Host cells suitable for expressing antibodies of the present disclosure include prokaryotes such as Archaebacteria and Eubacteria, including Gram-negative or Gram-positive organisms, eukaryotic microbes such as filamentous fungi or yeast, invertebrate cells such as insect or plant cells, and vertebrate cells such as mammalian host cell lines. Host cells are transformed with the above-described expression vectors and cultured in conventional nutrient media modified as appropriate for inducing promoters, selecting transformants, or amplifying the genes encoding the desired sequences. Antibodies produced by the host cells are purified using standard protein purification methods as known in the art.

[0473] Methods for antibody production including vector construction, expression, and purification are further described in Pückthun et al., Antibody Engineering: Producing antibodies in Escherichia coli: From PCR to fermentation 203-52 (McCafferty et al. eds., 1996); Kwong and Rader, E. coli Expression and Purification of Fab Antibody Fragments, in Current Protocols in Protein Science (2009); Tachibana and Takekoshi, Production of Antibody Fab Fragments in Escherichia coli, in Antibody Expression and Production (Al-Rubeai ed., 2011); and Therapeutic Monoclonal Antibodies: From Bench to Clinic (An ed., 2009).

[0474] It is, of course, contemplated that alternative methods, which are well known in the art, may be employed to prepare anti-pIgR antibodies. For instance, the appropriate amino acid sequence, or portions thereof, may be produced by direct peptide synthesis using solid-phase techniques (see, e.g., Stewart et al., Solid-Phase Peptide Synthesis (1969); and Merrifield, 1963, J. Am. Chem. Soc. 85:2149-54). In vitro protein synthesis may be performed using manual techniques or by automation. Various portions of the anti-pIgR antibody may be chemically synthesized separately and combined using chemical or enzymatic methods to produce the desired anti-pIgR antibody. Alternatively, antibodies may be purified from cells or bodily fluids, such as milk, of a transgenic animal engineered to express the antibody, as disclosed, for example, in U.S. Pat. Nos. 5,545,807 and 5,827,690.

[0475] Specifically, the single domain antibodies, or other pIgR binders, can be generated by immunizing llamas using mpIgR and hpIgR extracellular domain (ECD), performing single B-cell sorting, undertaking V-gene extraction, cloning the pIgR binders, such as VHH-Fc fusions, and then performing small scale expression and purification. Additional screening of the single domain antibodies and other molecules that bind to pIgR can be performed, including one or more of selecting for ELISA-positive, BLI-positive, and K_{D} less than 100 nM. Additionally, individual VHH binders (and other molecules that bind to pIgR) can be assayed for their ability to bind to MDCK cells expressing pIgR, e.g., hpIgR. Such assay can be performed using FACS analysis with MDCK cells expressing hpIgR, and measuring the mean fluorescence intensity (MFI) of fluorescently-labeled VHH molecules.

### 5.3. Therapeutic Molecules Comprising the Single Domain Antibodies

[0476] In one aspect, provided herein is a therapeutic molecule comprising a single domain antibody (e.g., a VHH domain) provided herein and a therapeutic agent.

[0477] In various embodiments, the single domain antibody provided herein can be genetically fused or chemically conjugated to any agents for delivery of these agents, for example, protein-based entities. The single domain antibody may be chemically-conjugated to the agent, or otherwise non-covalently conjugated to the agent.

[0478] The single domain antibodies provided herein are useful for delivering agents that can be used to treat subjects, such as biologics (including protein based therapeutics such as peptides and antibodies), and nucleotide based therapeutics such as viral gene therapeutics or RNA therapeutics). For example, the agent can be a diabetes medication, optionally selected from a group consisting of insulin, glucagon-like-peptide-1, insulin-mimic peptides, and glucagon-like-peptide-1-mimic peptides. The agent can be a peptide or antibody (or a fragment thereof), optionally selected from a group consisting of an anti-TNF-alpha antibody or a fragment thereof, an anti-IL23 antibody or a fragment thereof, an antibody that binds to a receptor of IL23 or a fragment thereof, an IL23 receptor inhibitor, and an immune checkpoint antibody such as an anti-PD-1 antibody. The agent can also be a vaccine, such as a vaccine for preventing an infection selected from a group consisting of Vibrio, Cholera, Typhoid, Rotavirus, Tuberculosis, HIV, Flu, Ebola, and Sendai.

[0479] Thus, provided herein are single domain antibodies (e.g., VHH domains) that are recombinantly fused or chemically conjugated (covalent or non-covalent conjugations) to a heterologous protein or polypeptide (or fragment thereof, for example, to a polypeptide of about 10, about 20, about 30, about 40, about 50, about 60, about 70, about 80, about 90, about 100, about 150, about 200, about 250, about 300, about 350, about 400, about 450 or about 500 amino acids, or over 500 amino acids) to generate fusion proteins, as well as uses thereof. In particular, provided herein are fusion proteins comprising an antigen-binding fragment of the single domain antibody provided herein (e.g., CDR1, CDR2, and/or CDR3) and a heterologous protein, polypeptide, or peptide. For example, an antibody that binds to a cell surface receptor expressed by a particular cell type may be fused or conjugated to a modified antibody provided herein.

[0480] Moreover, antibodies provided herein can be fused to marker or “tag” sequences, such as a peptide, to facilitate purification. In specific embodiments, the marker or tag amino acid sequence is a hexa-histidine peptide (SEQ ID NO: 1982), such as the tag provided in a pQE vector (see, e.g., QIAGEN, Inc.), among others, many of which are commercially available. For example, as described in Gentz et al., 1989, Proc. Natl. Acad. Sci. USA 86:821-24, hexa-histidine (SEQ ID NO: 1982) provides for convenient purification of the fusion protein. Other peptide tags useful for purification include, but are not limited to, the hemagglutinin (“HA”) tag, which corresponds to an epitope derived from the influenza hemagglutinin protein (Wilson et al., 1984, Cell 37:767-78), and the “FLAG” tag.

[0481] Methods for fusing or conjugating moieties (including polypeptides) to antibodies are known (see, e.g., Arnon et al., Monoclonal Antibodies for Immunotargeting of Drugs in Cancer Therapy, in Monoclonal Antibodies and Cancer Therapy 243-56 (Reisfeld et al. eds., 1985); Hellstrom et al., Antibodies for Drug Delivery, in Controlled Drug Delivery 623-53 (Robinson et al. eds., 2d ed. 1987); Thorpe, Antibody Carriers of Cytotoxic Agents in Cancer Therapy: A Review, in Monoclonal Antibodies: Biological and Clinical Applications 475-506 (Pinchera et al. eds., 1985); Analysis, Results, and Future Prospective of the Therapeutic Use of Radiolabeled Antibody in Cancer Therapy, in Monoclonal Antibodies for Cancer Detection and Therapy 303-16 (Baldwin et al. eds., 1985); Thorpe et al., 1982, Immunol. Rev. 62:119-58; U.S. Pat. Nos. 5,336,603; 5,622,929; 5,359,046; 5,349,053; 5,447,851; 5,723,125; 5,783,181; 5,908,626; 5,844,095; and 5,112,946; EP 307,434; EP 367,166; EP 394,827; PCT publications WO 91/06570, WO 96/04388, WO 96/22024, WO 97/34631, and WO 99/04813; Ashkenazi et al., 1991, Proc. Natl. Acad. Sci. USA, 88: 10535-39; Traunecker et al., 1988, Nature, 331:84-86; Zheng et al., 1995, J. Immunol. 154:5590-600; and Vil et al., 1992, Proc. Natl. Acad. Sci. USA 89:11337-41).

[0482] Fusion proteins may be generated, for example, through the techniques of gene-shuffling, motif-shuffling, exon-shuffling, and/or codon-shuffling (collectively referred to as “DNA shuffling”). DNA shuffling may be employed to alter the activities of the single domain antibodies as provided herein, including, for example, antibodies with higher affinities and lower dissociation rates (see, e.g., U.S. Pat. Nos. 5,605,793; 5,811,238; 5,830,721; 5,834,252; and U.S. Pat. No. 5,837,458; Patten et al., 1997, Curr. Opinion Biotechnol. 8:724-33; Harayama, 1998, Trends Biotechnol. 16(2):76-82; Hansson et al., 1999, J. Mol. Biol. 287:265-76; and Lorenzo and Blasco, 1998, Biotechniques 24(2):308-13). Antibodies, or the encoded antibodies, may be altered by being subjected to random mutagenesis by error-prone PCR, random nucleotide insertion, or other methods prior to recombination. A polynucleotide encoding an antibody provided herein may be recombined with one or more components, motifs, sections, parts, domains, fragments, etc. of one or more heterologous molecules.

[0483] In some embodiments, a single domain antibody provided herein (e.g., VHH domain) is conjugated to a second antibody to form an antibody heteroconjugate as described, for example, in U.S. Pat. No. 4,676,980.

[0484] Antibodies that bind to pIgR as provided herein may also be attached to solid supports, which are particularly useful for immunoassays or purification of the target antigen. Such solid supports include, but are not limited to, glass, cellulose, polyacrylamide, nylon, polystyrene, polyvinyl chloride, or polypropylene.

[0485] Other exemplary agents include, but are not limited to, a small molecule, a polynucleotide, a radioisotope, a toxin, an enzyme, an anticoagulant, a hormone, a cytokine, an anti-inflammatory molecule, an RNAi, a mRNA, a self-replicating RNA, an antibiotic, or an antibody-antibiotic conjugate. In one embodiment, the agent is an antibiotic. Exemplary antibiotics include, but are not limited to, macrolide antibiotic, a fluoroquinolone, a tetracycline, amoxicillin, ceftriaxone, penicillin G, linezolid, moxifloxacin, and azithromycin. Exemplary radioisotopes include, but are not limited to, from ¹⁸F, ⁹⁹Tc, ¹¹¹In, ¹²³I, ²⁰¹Tl, ¹³³Xe, ¹¹C, ¹³N, ¹⁵O, ¹⁸F, ⁶²Cu, ⁶⁴Cu, ¹²⁴I, ⁷⁶Br, ⁸²Rb, ⁸⁹Zr and ⁶⁸Ga.

[0486] In other embodiments, antibodies provided herein are conjugated or recombinantly fused, e.g., to a diagnostic molecule.

[0487] Such diagnosis and detection can be accomplished, for example, by coupling the antibody to detectable substances including, but not limited to, various enzymes, such as, but not limited to, horseradish peroxidase, alkaline phosphatase, beta-galactosidase, or acetylcholinesterase; prosthetic groups, such as, but not limited to, streptavidin/biotin or avidin/biotin; fluorescent materials, such as, but not limited to, umbelliferone, fluorescein, fluorescein isothiocynate, rhodamine, dichlorotriazinylamine fluorescein, dansyl chloride, or phycoerythrin; luminescent materials, such as, but not limited to, luminol; bioluminescent materials, such as, but not limited to, luciferase, luciferin, or aequorin; chemiluminescent material, such as, 225Acγ-emitting, Auger-emitting, β-emitting, an alpha-emitting or positron-emitting radioactive isotope. Exemplary radioactive isotopes include ³H, ¹¹C, ¹³C, ¹⁵N, ¹⁸F, ¹⁹F, ⁵⁵Co, ⁵⁷Co, ⁶⁰Co, ⁶¹Cu, ⁶²Cu, ⁶⁴Cu, ⁶⁷Cu, ⁶⁸Ga, ⁷²As, ⁷⁵Br, ⁸⁶Y, ⁸⁹Zr, ⁹⁰Sr, ^{94m}Tc, ^{99m}Tc, ¹¹⁵In, ¹²³I, ¹²⁴I, ¹²⁵I, ¹³¹I, ²¹¹At, ²¹²Bi, ²¹³Bi, ²²³Ra, ²²⁶Ra, ²²⁵Ac and ²²⁷Ac.

[0488] The linker may be a “cleavable linker” facilitating release of the conjugated agent in the cell, but non-cleavable linkers are also contemplated herein. Linkers for use in the conjugates of the present disclosure include, without limitation, acid labile linkers (e.g., hydrazone linkers), disulfide-containing linkers, peptidase-sensitive linkers (e.g., peptide linkers comprising amino acids, for example, valine and/or citrulline such as citrulline-valine or phenylalanine-lysine), photolabile linkers, dimethyl linkers (see, e.g., Chari et al., 1992, Cancer Res. 52:127-31; and U.S. Pat. No. 5,208,020), thioether linkers, or hydrophilic linkers designed to evade multidrug transporter-mediated resistance (see, e.g., Kovtun et al., 2010, Cancer Res. 70:2528-37).

[0489] Conjugates of the antibody and agent may be made using a variety of bifunctional protein coupling agents such as BMPS, EMCS, GMBS, HBVS, LC-SMCC, MBS, MPBH, SBAP, SIA, SIAB, SMCC, SMPB, SMPH, sulfo-EMCS, sulfo-GMBS, sulfo-KMUS, sulfo-MBS, sulfo-SIAB, sulfo-SMCC, sulfo-SMPB, and SVSB (succinimidyl-(4-vinylsulfone)benzoate). The present disclosure further contemplates that conjugates of antibodies and agents may be prepared using any suitable methods as disclosed in the art (see, e.g., Bioconjugate Techniques (Hermanson ed., 2d ed. 2008)).

[0490] Conventional conjugation strategies for antibodies and agents have been based on random conjugation chemistries involving the F-amino group of Lys residues or the thiol group of Cys residues, which results in heterogenous conjugates. Recently developed techniques allow site-specific conjugation to antibodies, resulting in homogeneous loading and avoiding conjugate subpopulations with altered antigen-binding or pharmacokinetics. These include engineering of “thiomabs” comprising cysteine substitutions at positions on the heavy and light chains that provide reactive thiol groups and do not disrupt immunoglobulin folding and assembly or alter antigen binding (see, e.g., Junutula et al., 2008, J. Immunol. Meth. 332: 41-52; and Junutula et al., 2008, Nature Biotechnol. 26:925-32). In another method, selenocysteine is cotranslationally inserted into an antibody sequence by recoding the stop codon UGA from termination to selenocysteine insertion, allowing site specific covalent conjugation at the nucleophilic selenol group of selenocysteine in the presence of the other natural amino acids (see, e.g., Hofer et al., 2008, Proc. Natl. Acad. Sci. USA 105:12451-56; and Hofer et al., 2009, Biochemistry 48(50):12047-57).

[0491] 5.3.1. Methods of Making a Genetically Fused Protein

[0492] In various embodiments, the single domain antibody is genetically fused to the agent. Genetic fusion may be accomplished by placing a linker (e.g., a polypeptide) between the single domain antibody and the agent. The linker may be a flexible linker comprising a sequence selected from the group consisting of EPKTPKPQPQPQLQPQPNPTTESKSPK (SEQ ID NO: 1978), (EAAAK)n (SEQ ID NO: 1967), (GGGGS)n (SEQ ID NO: 1968) and (GGGS)n (SEQ ID NO: 1969), wherein n is an integer from 1 to 20.

[0493] In various embodiments, the single domain antibody is genetically conjugated to a therapeutic molecule, with a hinge region linking the single domain antibody to the therapeutic molecule. The hinge region may be a flexible linker comprising a sequence selected from the group consisting of EPKTPKPQPQPQLQPQPNPTTESKSPK (SEQ ID NO: 1978), (EAAAK)n (SEQ ID NO: 1967), (GGGGS)n (SEQ ID NO: 1968) and (GGGS)n (SEQ ID NO: 1969), wherein n is an integer from 1 to 20. In some embodiments, the hinge region comprises the sequence EPKTPKPQPQPQLQPQPNPTTESKSPK (SEQ ID NO: 1978), or comprises an amino acid sequence having at least 50, at least 55, at least 60, at least 65, at least 70, at least 75, at least 80, at least 85, at least 90, at least 95, at least 98 or at least 99%, sequence identity with EPKTPKPQPQPQLQPQPNPTTESKSPK (SEQ ID NO: 1978). In some embodiments, the hinge region comprises the sequence EPKSCDKTHTCPPCP (SEQ ID NO: 1970), or comprises an amino acid sequence having at least 50, at least 55, at least 60, at least 65, at least 70, at least 75, at least 80, at least 85, at least 90, at least 95, at least 98 or at least 99%, sequence identity with EPKSCDKTHTCPPCP (SEQ ID NO: 1970). In some embodiments, the hinge region comprises the sequence ERKCCVECPPCP (SEQ ID NO: 1971), or comprises an amino acid sequence having at least 50, at least 55, at least 60, at least 65, at least 70, at least 75, at least 80, at least 85, at least 90, at least 95, at least 98 or at least 99%, sequence identity with ERKCCVECPPCP (SEQ ID NO: 1971). In some embodiments, the hinge region comprises the sequence ELKTPLGDTTHTCPRCP(EPKSCDTPPPCPRCP)₃ (SEQ ID NO: 1972), or comprises an amino acid sequence having at least 50, at least 55, at least 60, at least 65, at least 70, at least 75, at least 80, at least 85, at least 90, at least 95, at least 98 or at least 99%, sequence identity with ELKTPLGDTTHTCPRCP(EPKSCDTPPPCPRCP)₃ (SEQ ID NO: 1972). In some embodiments, the hinge region comprises the sequence ESKYGPPCPSCP (SEQ ID NO: 1973), or comprises an amino acid sequence having at least 50, at least 55, at least 60, at least 65, at least 70, at least 75, at least 80, at least 85, at least 90, at least 95, at least 98 or at least 99%, sequence identity with ESKYGPPCPSCP (SEQ ID NO: 1973).

[0494] Also provided herein are methods for making the various fusion proteins provided herein. In a specific embodiment, the fusion protein provided herein is recombinantly expressed.

[0495] Recombinant expression of a fusion protein provided herein may require construction of an expression vector containing a polynucleotide that encodes the protein or a fragment thereof. Once a polynucleotide encoding a protein provided herein or a fragment thereof has been obtained, the vector for the production of the molecule may be produced by recombinant DNA technology using techniques well-known in the art. Thus, methods for preparing a protein by expressing a polynucleotide containing an encoding nucleotide sequence are described herein. Methods which are well known to those skilled in the art can be used to construct expression vectors containing coding sequences and appropriate transcriptional and translational control signals. These methods include, for example, in vitro recombinant DNA techniques, synthetic techniques, and in vivo genetic recombination. Also provided are replicable vectors comprising a nucleotide sequence encoding a fusion protein provided herein, or a fragment thereof, or a CDR, operably linked to a promoter.

[0496] The expression vector can be transferred to a host cell by conventional techniques and the transfected cells are then cultured by conventional techniques to produce a fusion protein provided herein. Thus, also provided herein are host cells containing a polynucleotide encoding a fusion protein provided herein or fragments thereof operably linked to a heterologous promoter.

[0497] A variety of host-expression vector systems may be utilized to express the fusion protein provided herein (see, e.g., U.S. Pat. No. 5,807,715). Such host-expression systems represent vehicles by which the coding sequences of interest may be produced and subsequently purified, but also represent cells which may, when transformed or transfected with the appropriate nucleotide coding sequences, express a fusion protein provided herein in situ. These include but are not limited to microorganisms such as bacteria (e.g., E. coli and B. subtilis) transformed with recombinant bacteriophage DNA, plasmid DNA or cosmid DNA expression vectors containing coding sequences; yeast (e.g., Saccharomyces Pichia) transformed with recombinant yeast expression vectors containing coding sequences; insect cell systems infected with recombinant virus expression vectors (e.g., baculovirus) containing coding sequences; plant cell systems infected with recombinant virus expression vectors (e.g., cauliflower mosaic virus, CaMV, tobacco mosaic virus, TMV) or transformed with recombinant plasmid expression vectors (e.g., Ti plasmid) containing coding sequences; or mammalian cell systems (e.g., COS, CHO, BHK, 293, NS0, and 3T3 cells) harboring recombinant expression constructs containing promoters derived from the genome of mammalian cells (e.g., metallothionein promoter) or from mammalian viruses (e.g., the adenovirus late promoter; the vaccinia virus 7.5K promoter). Bacterial cells such as Escherichia coli, or, eukaryotic cells, especially for the expression of whole recombinant antibody molecule, can be used for the expression of a recombinant fusion protein. For example, mammalian cells such as Chinese hamster ovary cells (CHO), in conjunction with a vector such as the major intermediate early gene promoter element from human cytomegalovirus is an effective expression system for antibodies or variants thereof (Foecking et al., 1986, Gene 45:101; and Cockett et al., 1990, Bio/Technology 8:2). In some embodiments, fusion proteins provided herein are produced in CHO cells. In a specific embodiment, the expression of nucleotide sequences encoding the fusion proteins provided herein is regulated by a constitutive promoter, inducible promoter or tissue specific promoter.

[0498] In bacterial systems, a number of expression vectors may be advantageously selected depending upon the use intended for the fusion protein being expressed. For example, when a large quantity of such a fusion protein is to be produced, for the generation of pharmaceutical compositions of a fusion protein, vectors which direct the expression of high levels of fusion protein products that are readily purified may be desirable. Such vectors include, but are not limited to, the E. coli expression vector pUR278 (Ruther et al., 1983, EMBO 12:1791), in which the coding sequence may be ligated individually into the vector in frame with the lac Z coding region so that a fusion protein is produced; pIN vectors (Inouye & Inouye, 1985, Nucleic Acids Res. 13:3101-3109; Van Heeke & Schuster, 1989, J. Biol. Chem. 24:5503-5509); and the like. pGEX vectors may also be used to express foreign polypeptides as fusion proteins with glutathione 5-transferase (GST). In general, such fusion proteins are soluble and can easily be purified from lysed cells by adsorption and binding to matrix glutathione agarose beads followed by elution in the presence of free glutathione. The pGEX vectors are designed to include thrombin or factor Xa protease cleavage sites so that the cloned target gene product can be released from the GST moiety.

[0499] In an insect system, Autographa californica nuclear polyhedrosis virus (AcNPV) is used as a vector to express foreign genes. The virus grows in Spodoptera frugiperda cells. The coding sequence may be cloned individually into non-essential regions (for example the polyhedrin gene) of the virus and placed under control of an AcNPV promoter (for example the polyhedrin promoter).

[0500] In mammalian host cells, a number of viral-based expression systems may be utilized. In cases where an adenovirus is used as an expression vector, the coding sequence of interest may be ligated to an adenovirus transcription/translation control complex, e.g., the late promoter and tripartite leader sequence. This chimeric gene may then be inserted in the adenovirus genome by in vitro or in vivo recombination. Insertion in a non-essential region of the viral genome (e.g., region El or E3) will result in a recombinant virus that is viable and capable of expressing the fusion protein in infected hosts (e.g., see Logan & Shenk, 1984, Proc. Natl. Acad. Sci. USA 8 1:355-359). Specific initiation signals may also be required for efficient translation of inserted coding sequences. These signals include the ATG initiation codon and adjacent sequences. Furthermore, the initiation codon must be in phase with the reading frame of the desired coding sequence to ensure translation of the entire insert. These exogenous translational control signals and initiation codons can be of a variety of origins, both natural and synthetic. The efficiency of expression may be enhanced by the inclusion of appropriate transcription enhancer elements, transcription terminators, etc. (see, e.g., Bittner et al., 1987, Methods in Enzymol. 153:51-544).

[0501] In addition, a host cell strain may be chosen which modulates the expression of the inserted sequences, or modifies and processes the gene product in the specific fashion desired. Such modifications (e.g., glycosylation) and processing (e.g., cleavage) of protein products may be important for the function of the protein. Different host cells have characteristic and specific mechanisms for the post-translational processing and modification of proteins and gene products. Appropriate cell lines or host systems can be chosen to ensure the correct modification and processing of the foreign protein expressed. To this end, eukaryotic host cells which possess the cellular machinery for proper processing of the primary transcript, glycosylation, and phosphorylation of the gene product may be used. Such mammalian host cells include but are not limited to CHO, VERY, BHK, Hela, COS, MDCK, 293, 3T3, W138, BT483, Hs578T, HTB2, BT2O and T47D, NS0 (a murine myeloma cell line that does not endogenously produce any immunoglobulin chains), CRL7030 and HsS78Bst cells.

[0502] For long-term, high-yield production of recombinant proteins, stable expression can be utilized. For example, cell lines which stably express the fusion proteins may be engineered. Rather than using expression vectors which contain viral origins of replication, host cells can be transformed with DNA controlled by appropriate expression control elements (e.g., promoter, enhancer, sequences, transcription terminators, polyadenylation sites, etc.), and a selectable marker. Following the introduction of the foreign DNA, engineered cells may be allowed to grow for 1-2 days in an enriched media, and then are switched to a selective media. The selectable marker in the recombinant plasmid confers resistance to the selection and allows cells to stably integrate the plasmid into their chromosomes and grow to form foci which in turn can be cloned and expanded into cell lines. This method may advantageously be used to engineer cell lines which express the fusion protein. Such engineered cell lines may be particularly useful in screening and evaluation of compositions that interact directly or indirectly with the binding molecule.

[0503] A number of selection systems may be used, including but not limited to, the herpes simplex virus thymidine kinase (Wigler et al., 1977, Cell 11:223), hypoxanthineguanine phosphoribosyltransferase (Szybalska & Szybalski, 1992, Proc. Natl. Acad. Sci. USA 48:202), and adenine phosphoribosyltransferase (Lowy et al., 1980, Cell 22:8-17) genes can be employed in tk-, hgprt- or aprt-cells, respectively. Also, antimetabolite resistance can be used as the basis of selection for the following genes: dhfr, which confers resistance to methotrexate (Wigler et al., 1980, Natl. Acad. Sci. USA 77:357; O'Hare et al., 1981, Proc. Natl. Acad. Sci. USA 78:1527); gpt, which confers resistance to mycophenolic acid (Mulligan & Berg, 1981, Proc. Natl. Acad. Sci. USA 78:2072); neo, which confers resistance to the aminoglycoside G-418 (Wu and Wu, 1991, Biotherapy 3:87-95; Tolstoshev, 1993, Ann. Rev. Pharmacol. Toxicol. 32:573-596; Mulligan, 1993, Science 260:926-932; and Morgan and Anderson, 1993, Ann. Rev. Biochem. 62:191-217; May, 1993, TIB TECH 11(5):155-2 15); and hygro, which confers resistance to hygromycin (Santerre et al., 1984, Gene 30:147). Methods commonly known in the art of recombinant DNA technology may be routinely applied to select the desired recombinant clone, and such methods are described, for example, in Ausubel et al. (eds.), Current Protocols in Molecular Biology, John Wiley & Sons, NY (1993); Kriegler, Gene Transfer and Expression, A Laboratory Manual, Stockton Press, NY (1990); and in Chapters 12 and 13, Dracopoli et al. (eds.), Current Protocols in Human Genetics, John Wiley & Sons, NY (1994); Colberre-Garapin et al., 1981, J. Mol. Biol. 150:1, which are incorporated by reference herein in their entireties.

[0504] The expression level of a fusion protein can be increased by vector amplification (for a review, see Bebbington and Hentschel, The use of vectors based on gene amplification for the expression of cloned genes in mammalian cells in DNA cloning, Vol. 3 (Academic Press, New York, 1987)). When a marker in the vector system expressing a fusion protein is amplifiable, increase in the level of inhibitor present in culture of host cell will increase the number of copies of the marker gene. Since the amplified region is associated with the fusion protein gene, production of the fusion protein will also increase (Crouse et al., 1983, Mol. Cell. Biol. 3:257).

[0505] The host cell may be co-transfected with multiple expression vectors provided herein. The vectors may contain identical selectable markers which enable equal expression of respective encoding polypeptides. Alternatively, a single vector may be used which encodes, and is capable of expressing multiple polypeptides. The coding sequences may comprise cDNA or genomic DNA.

[0506] Once a fusion protein provided herein has been produced by recombinant expression, it may be purified by any method known in the art for purification of a polypeptide (e.g., an immunoglobulin molecule), for example, by chromatography (e.g., ion exchange, affinity, particularly by affinity for the specific antigen after Protein A, sizing column chromatography, and Kappa select affinity chromatography), centrifugation, differential solubility, or by any other standard technique for the purification of proteins. Further, the fusion protein molecules provided herein can be fused to heterologous polypeptide sequences described herein or otherwise known in the art to facilitate purification.

### 5.4. Polynucleotides

[0507] In certain embodiments, the disclosure provides polynucleotides that encode the single domain antibodies that bind to pIgR and fusion proteins comprising the single domain antibodies that bind to pIgR described herein. The polynucleotides of the disclosure can be in the form of RNA or in the form of DNA. DNA includes cDNA, genomic DNA, and synthetic DNA; and can be double-stranded or single-stranded, and if single stranded can be the coding strand or non-coding (anti-sense) strand. In some embodiments, the polynucleotide is in the form of cDNA. In some embodiments, the polynucleotide is a synthetic polynucleotide.

[0508] In exemplary embodiments, the nucleic acid molecule provided herein comprises a sequence that encodes the single domain antibody having anyone of the sequences of SEQ ID NOs: 1 to 122.

[0509] Also provided are vectors comprising the nucleic acid molecules described herein. In an embodiment, the nucleic acid molecules can be incorporated into a recombinant expression vector. The present disclosure provides recombinant expression vectors comprising any of the nucleic acids of the disclosure. As used herein, the term “recombinant expression vector” means a genetically-modified oligonucleotide or polynucleotide construct that permits the expression of an mRNA, protein, polypeptide, or peptide by a host cell, when the construct comprises a nucleotide sequence encoding the mRNA, protein, polypeptide, or peptide, and the vector is contacted with the cell under conditions sufficient to have the mRNA, protein, polypeptide, or peptide expressed within the cell. The vectors described herein are not naturally-occurring as a whole; however, parts of the vectors can be naturally-occurring. The described recombinant expression vectors can comprise any type of nucleotides, including, but not limited to DNA and RNA, which can be single-stranded or double-stranded, synthesized or obtained in part from natural sources, and which can contain natural, non-natural or altered nucleotides. The recombinant expression vectors can comprise naturally-occurring or non-naturally-occurring internucleotide linkages, or both types of linkages. The non-naturally occurring or altered nucleotides or internucleotide linkages do not hinder the transcription or replication of the vector.

[0510] In an embodiment, the recombinant expression vector of the disclosure can be any suitable recombinant expression vector, and can be used to transform or transfect any suitable host. Suitable vectors include those designed for propagation and expansion or for expression or both, such as plasmids and viruses. The vector can be selected from the group consisting of the pUC series (Fermentas Life Sciences, Glen Burnie, Md.), the pBluescript series (Stratagene, LaJolla, Calif.), the pET series (Novagen, Madison, Wis.), the pGEX series (Pharmacia Biotech, Uppsala, Sweden), and the pEX series (Clontech, Palo Alto, Calif.). Bacteriophage vectors, such as λGT10, λGT11, λEMBL4, and λNM1149, λZapII (Stratagene) can be used. Examples of plant expression vectors include pBI01, pBI01.2, pBI121, pBI101.3, and pBIN19 (Clontech). Examples of animal expression vectors include pEUK-Cl, pMAM, and pMAMneo (Clontech). The recombinant expression vector may be a viral vector, e.g., a retroviral vector, e.g., a gamma retroviral vector.

[0511] In an embodiment, the recombinant expression vectors are prepared using standard recombinant DNA techniques described in, for example, Sambrook et al., supra, and Ausubel et al., supra. Constructs of expression vectors, which are circular or linear, can be prepared to contain a replication system functional in a prokaryotic or eukaryotic host cell. Replication systems can be derived, e.g., from ColE1, SV40, 2μ plasmid, λ, bovine papilloma virus, and the like.

[0512] The recombinant expression vector may comprise regulatory sequences, such as transcription and translation initiation and termination codons, which are specific to the type of host (e.g., bacterium, plant, fungus, or animal) into which the vector is to be introduced, as appropriate, and taking into consideration whether the vector is DNA- or RNA-based.

[0513] The recombinant expression vector can include one or more marker genes, which allow for selection of transformed or transfected hosts. Marker genes include biocide resistance, e.g., resistance to antibiotics, heavy metals, etc., complementation in an auxotrophic host to provide prototrophy, and the like. Suitable marker genes for the described expression vectors include, for instance, neomycin/G418 resistance genes, histidinol x resistance genes, histidinol resistance genes, tetracycline resistance genes, and ampicillin resistance genes.

[0514] The recombinant expression vector can comprise a native or normative promoter operably linked to the nucleotide sequence of the disclosure. The selection of promoters, e.g., strong, weak, tissue-specific, inducible and developmental-specific, is within the ordinary skill of the artisan. Similarly, the combining of a nucleotide sequence with a promoter is also within the skill of the artisan. The promoter can be a non-viral promoter or a viral promoter, e.g., a cytomegalovirus (CMV) promoter, an RSV promoter, an SV40 promoter, or a promoter found in the long-terminal repeat of the murine stem cell virus.

[0515] The recombinant expression vectors can be designed for either transient expression, for stable expression, or for both. Also, the recombinant expression vectors can be made for constitutive expression or for inducible expression.

[0516] Further, the recombinant expression vectors can be made to include a suicide gene. As used herein, the term “suicide gene” refers to a gene that causes the cell expressing the suicide gene to die. The suicide gene can be a gene that confers sensitivity to an agent, e.g., a drug, upon the cell in which the gene is expressed, and causes the cell to die when the cell is contacted with or exposed to the agent. Suicide genes are known in the art and include, for example, the Herpes Simplex Virus (HSV) thymidine kinase (TK) gene, cytosine deaminase, purine nucleoside phosphorylase, and nitroreductase.

[0517] The present disclosure further relates to variants of the polynucleotides described herein, wherein the variant encodes, for example, fragments, analogs, and/or derivatives of the single domain antibody that binds pIgR of the disclosure. In certain embodiments, the present disclosure provides a polynucleotide comprising a polynucleotide having a nucleotide sequence at least about 80% identical, at least about 85% identical, at least about 90% identical, at least about 95% identical, and in some embodiments, at least about 96%, 97%, 98% or 99% identical to a polynucleotide encoding the single domain antibody that binds pIgR of the disclosure.

[0518] As used herein, the phrase “a polynucleotide having a nucleotide sequence at least, for example, 95% “identical” to a reference nucleotide sequence” is intended to mean that the nucleotide sequence of the polynucleotide is identical to the reference sequence except that the polynucleotide sequence can include up to five point mutations per each 100 nucleotides of the reference nucleotide sequence. In other words, to obtain a polynucleotide having a nucleotide sequence at least 95% identical to a reference nucleotide sequence, up to 5% of the nucleotides in the reference sequence can be deleted or substituted with another nucleotide, or a number of nucleotides up to 5% of the total nucleotides in the reference sequence can be inserted into the reference sequence. These mutations of the reference sequence can occur at the 5′ or 3′ terminal positions of the reference nucleotide sequence or anywhere between those terminal positions, interspersed either individually among nucleotides in the reference sequence or in one or more contiguous groups within the reference sequence.

[0519] The polynucleotide variants can contain alterations in the coding regions, non-coding regions, or both. In some embodiments, a polynucleotide variant contains alterations which produce silent substitutions, additions, or deletions, but does not alter the properties or activities of the encoded polypeptide. In some embodiments, a polynucleotide variant comprises silent substitutions that results in no change to the amino acid sequence of the polypeptide (due to the degeneracy of the genetic code). Polynucleotide variants can be produced for a variety of reasons, for example, to optimize codon expression for a particular host (i.e., change codons in the human mRNA to those preferred by a bacterial host such as E. coli). In some embodiments, a polynucleotide variant comprises at least one silent mutation in a non-coding or a coding region of the sequence.

[0520] In some embodiments, a polynucleotide variant is produced to modulate or alter expression (or expression levels) of the encoded polypeptide. In some embodiments, a polynucleotide variant is produced to increase expression of the encoded polypeptide. In some embodiments, a polynucleotide variant is produced to decrease expression of the encoded polypeptide. In some embodiments, a polynucleotide variant has increased expression of the encoded polypeptide as compared to a parental polynucleotide sequence. In some embodiments, a polynucleotide variant has decreased expression of the encoded polypeptide as compared to a parental polynucleotide sequence.

[0521] In certain embodiments, a polynucleotide is isolated. In certain embodiments, a polynucleotide is substantially pure.

[0522] Also provided are host cells comprising the nucleic acid molecules described herein. The host cell may be any cell that contains a heterologous nucleic acid. The heterologous nucleic acid can be a vector (e.g., an expression vector). For example, a host cell can be a cell from any organism that is selected, modified, transformed, grown, used or manipulated in any way, for the production of a substance by the cell, for example the expression by the cell of a gene, a DNA or RNA sequence, a protein or an enzyme. An appropriate host may be determined. For example, the host cell may be selected based on the vector backbone and the desired result. By way of example, a plasmid or cosmid can be introduced into a prokaryote host cell for replication of several types of vectors. Bacterial cells such as, but not limited to DH5a, JM109, and KCB, SURE® Competent Cells, and SOLOPACK Gold Cells, can be used as host cells for vector replication and/or expression. Additionally, bacterial cells such as E. coli LE392 could be used as host cells for phage viruses. Eukaryotic cells that can be used as host cells include, but are not limited to yeast (e.g., YPH499, YPH500 and YPH501), insects and mammals. Examples of mammalian eukaryotic host cells for replication and/or expression of a vector include, but are not limited to, HeLa, NIH3T3, Jurkat, 293, COS, Saos, PC12, SP2/0 (American Type Culture Collection (ATCC), Manassas, Va., CRL-1581), NS0 (European Collection of Cell Cultures (ECACC), Salisbury, Wiltshire, UK, ECACC No. 85110503), FO (ATCC CRL-1646) and Ag653 (ATCC CRL-1580) murine cell lines. An exemplary human myeloma cell line is U266 (ATCC CRL-TIB-196). Other useful cell lines include those derived from Chinese Hamster Ovary (CHO) cells such as CHO-K1SV (Lonza Biologics, Walkersville, Md.), CHO-K1 (ATCC CRL-61) or DG44.

### 5.5. Pharmaceutical Compositions

[0523] In one aspect, the present disclosure further provides pharmaceutical compositions comprising a single domain antibody or a therapeutic molecule of the present disclosure. In some embodiments, a pharmaceutical composition comprises therapeutically effective amount of the antibody or therapeutic molecule provided herein and a pharmaceutically acceptable excipient.

[0524] In a specific embodiment, the term “excipient” can also refer to a diluent, adjuvant (e.g., Freunds' adjuvant (complete or incomplete) or vehicle. Pharmaceutical excipients can be sterile liquids, such as water and oils, including those of petroleum, animal, vegetable or synthetic origin, such as peanut oil, soybean oil, mineral oil, sesame oil and the like. Water is an exemplary excipient. Saline solutions and aqueous dextrose and glycerol solutions can also be employed as liquid excipients. Suitable pharmaceutical excipients include starch, glucose, lactose, sucrose, gelatin, malt, rice, flour, chalk, silica gel, sodium stearate, glycerol monostearate, talc, sodium chloride, dried skim milk, glycerol, propylene, glycol, water, ethanol and the like. The composition, if desired, can also contain minor amounts of wetting or emulsifying agents, or pH buffering agents. These compositions can take the form of solutions, suspensions, emulsion, tablets, pills, capsules, powders, sustained-release formulations and the like. Examples of suitable pharmaceutical excipients are described in Remington's Pharmaceutical Sciences (1990) Mack Publishing Co., Easton, Pa. Such compositions will contain a prophylactically or therapeutically effective amount of the antibodies or therapeutic molecules provided herein, such as in purified form, together with a suitable amount of excipient so as to provide the form for proper administration to the patient. The formulation should suit the mode of administration.

[0525] The single domain antibody or therapeutic molecule provided herein may be formulated in any suitable form for delivery to a target cell/tissue, e.g., as microcapsules or macroemulsions (Remington, supra; Park et al., 2005, Molecules 10:146-61; Malik et al., 2007, Curr. Drug. Deliv. 4:141-51), as sustained release formulations (Putney and Burke, 1998, Nature Biotechnol. 16:153-57), or in liposomes (Maclean et al., 1997, Int. J. Oncol. 11:325-32; Kontermann, 2006, Curr. Opin. Mol. Ther. 8:39-45).

[0526] The single domain antibody or therapeutic molecule provided herein can also be entrapped in microcapsule prepared, for example, by coacervation techniques or by interfacial polymerization, for example, hydroxymethylcellulose or gelatin-microcapsule and poly-(methylmethacylate) microcapsule, respectively, in colloidal drug delivery systems (for example, liposomes, albumin microspheres, microemulsions, nano-particles, and nanocapsules) or in macroemulsions. Such techniques are disclosed, for example, in Remington, supra.

[0527] Various compositions and delivery systems are known and can be used with the single domain antibody or therapeutic molecule provided herein, including, but not limited to, encapsulation in liposomes, microparticles, microcapsules, recombinant cells capable of expressing the single domain antibody or therapeutic molecule provided herein, construction of a nucleic acid as part of a retroviral or other vector, etc.

[0528] In some embodiments, the antibody or therapeutic molecule provide herein is formulated in a pharmaceutic composition suitable for less-invasive or non-invasive administration. In a specific embodiment, the antibody or therapeutic molecule provide herein is formulated in a pharmaceutic composition suitable for oral administration. In a specific embodiment, the antibody or therapeutic molecule provide herein is formulated in a pharmaceutic composition suitable for buccal administration. In a specific embodiment, the antibody or therapeutic molecule provide herein is formulated in a pharmaceutic composition suitable for inhalation administration. In a specific embodiment, the antibody or therapeutic molecule provide herein is formulated in a pharmaceutic composition suitable for nasal administration. Non-limiting exemplary dosage forms are described in more detail in the following sections.

[0529] 5.5.1. Oral Dosage Forms

[0530] In certain embodiments, the antibodies or therapeutic molecules provided herein are formulated in pharmaceutical compositions suitable for oral administration. Oral administration can be presented as discrete dosage forms, such as, but are not limited to, tablets (e.g., chewable tablets), caplets, capsules, and liquids (e.g., flavored syrups). Such dosage forms contain predetermined amounts of active ingredients, and may be prepared by methods of pharmacy well known to those skilled in the art. See generally, Remington's Pharmaceutical Sciences, 18th ed., Mack Publishing, Easton Pa. (1990).

[0531] Typical oral dosage forms are prepared by combining the active ingredients in an intimate admixture with at least one excipient according to conventional pharmaceutical compounding techniques. Excipients can take a wide variety of forms depending on the form of preparation desired for administration. For example, excipients suitable for use in oral liquid or aerosol dosage forms include, but are not limited to, water, glycols, oils, alcohols, flavoring agents, preservatives, and coloring agents. Examples of excipients suitable for use in solid oral dosage forms (e.g., powders, tablets, capsules, and caplets) include, but are not limited to, starches, sugars, micro-crystalline cellulose, diluents, granulating agents, lubricants, binders, and disintegrating agents.

[0532] Because of their ease of administration, tablets and capsules represent advantageous oral dosage unit forms, in which case solid excipients are employed. If desired, tablets can be coated by standard aqueous or nonaqueous techniques. Such dosage forms can be prepared by any of the methods of pharmacy. In general, pharmaceutical compositions and dosage forms are prepared by uniformly and intimately admixing the active ingredients with liquid carriers, finely divided solid carriers, or both, and then shaping the product into the desired presentation if necessary.

[0533] For example, a tablet can be prepared by compression or molding. Compressed tablets can be prepared by compressing in a suitable machine the active ingredients in a free-flowing form such as powder or granules, optionally mixed with an excipient. Molded tablets can be made by molding in a suitable machine a mixture of the powdered compound moistened with an inert liquid diluent.

[0534] Examples of excipients that can be used in oral dosage forms provided herein include, but are not limited to, binders, fillers, disintegrants, and lubricants. Binders suitable for use in pharmaceutical compositions and dosage forms include, but are not limited to, corn starch, potato starch, or other starches, gelatin, natural and synthetic gums such as acacia, sodium alginate, alginic acid, other alginates, powdered tragacanth, guar gum, cellulose and its derivatives (e.g., ethyl cellulose, cellulose acetate, carboxymethyl cellulose calcium, sodium carboxymethyl cellulose), polyvinyl pyrrolidone, methyl cellulose, pre-gelatinized starch, hydroxypropyl methyl cellulose, (e.g., Nos. 2208, 2906, 2910), microcrystalline cellulose, and mixtures thereof.

[0535] Suitable forms of microcrystalline cellulose include, but are not limited to, the materials sold as AVICEL-PH-101, AVICEL-PH-103 AVICEL RC-581, AVICEL-PH-105 (available from FMC Corporation, American Viscose Division, Avicel Sales, Marcus Hook, Pa.), and mixtures thereof. An specific binder is a mixture of microcrystalline cellulose and sodium carboxymethyl cellulose sold as AVICEL RC-581. Suitable anhydrous or low moisture excipients or additives include AVICEL-PH-103™ and Starch 1500 LM.

[0536] Examples of fillers suitable for use in the pharmaceutical compositions and dosage forms disclosed herein include, but are not limited to, talc, calcium carbonate (e.g., granules or powder), microcrystalline cellulose, powdered cellulose, dextrates, kaolin, mannitol, silicic acid, sorbitol, starch, pre-gelatinized starch, and mixtures thereof. The binder or filler in pharmaceutical compositions provided herein is typically present in from about 50 to about 99 weight percent of the pharmaceutical composition or dosage form.

[0537] Disintegrants are used in compositions to provide tablets that disintegrate when exposed to an aqueous environment. Tablets that contain too much disintegrant may disintegrate in storage, while those that contain too little may not disintegrate at a desired rate or under the desired conditions. Thus, a sufficient amount of disintegrant that is neither too much nor too little to detrimentally alter the release of the active ingredients should be used to form solid oral dosage forms. The amount of disintegrant used varies based upon the type of formulation, and is readily discernible to those of ordinary skill in the art. Typical pharmaceutical compositions comprise from about 0.5 to about 15 weight percent of disintegrant, preferably from about 1 to about 5 weight percent of disintegrant.

[0538] Disintegrants that can be used in pharmaceutical compositions and dosage forms include, but are not limited to, agar-agar, alginic acid, calcium carbonate, microcrystalline cellulose, croscarmellose sodium, crospovidone, polacrilin potassium, sodium starch glycolate, potato or tapioca starch, other starches, pre-gelatinized starch, other starches, clays, other algins, other celluloses, gums, and mixtures thereof.

[0539] Lubricants that can be used in pharmaceutical compositions and dosage forms include, but are not limited to, calcium stearate, magnesium stearate, mineral oil, light mineral oil, glycerin, sorbitol, mannitol, polyethylene glycol, other glycols, stearic acid, sodium lauryl sulfate, talc, hydrogenated vegetable oil (e.g., peanut oil, cottonseed oil, sunflower oil, sesame oil, olive oil, corn oil, and soybean oil), zinc stearate, ethyl oleate, ethyl laureate, agar, and mixtures thereof. Additional lubricants include, for example, a syloid silica gel (AEROSIL200, manufactured by W.R. Grace Co. of Baltimore, Md.), a coagulated aerosol of synthetic silica (marketed by Degussa Co. of Plano, Tex.), CAB-O-SIL (a pyrogenic silicon dioxide product sold by Cabot Co. of Boston, Mass.), and mixtures thereof. If used at all, lubricants are typically used in an amount of less than about 1 weight percent of the pharmaceutical compositions or dosage forms into which they are incorporated.

[0540] 5.5.2. Topical and Mucosal Dosage Forms

[0541] Topical and mucosal dosage forms provided herein include, but are not limited to, sprays, aerosols, solutions, emulsions, suspensions, eye drops or other ophthalmic preparations, or other forms known to one of skill in the art. See, e.g., Remington's Pharmaceutical Sciences, 16^{th} and 18^{th} eds., Mack Publishing, Easton Pa. (1980 & 1990); and Introduction to Pharmaceutical Dosage Forms, 4th ed., Lea & Febiger, Philadelphia (1985). In some embodiments, the mucosal dosage forms provided herein are suitable for administration to oral mucosal surface (buccal) or to nasal mucosal surface of a subject.

[0542] Suitable excipients (e.g., carriers and diluents) and other materials that can be used to provide topical and mucosal dosage forms are well known to those skilled in the pharmaceutical arts, and depend on the particular tissue to which a given pharmaceutical composition or dosage form will be applied. With that fact in mind, typical excipients include, but are not limited to, water, acetone, ethanol, ethylene glycol, propylene glycol, butane-1,3-diol, isopropyl myristate, isopropyl palmitate, mineral oil, and mixtures thereof to form solutions, emulsions or gels, which are non-toxic and pharmaceutically acceptable. Moisturizers or humectants can also be added to pharmaceutical compositions and dosage forms if desired. Examples of such additional ingredients are well known in the art. See, e.g., Remington's Pharmaceutical Sciences, 16^{th} and 18^{th} eds., Mack Publishing, Easton Pa. (1980 & 1990).

[0543] The pH of a pharmaceutical composition or dosage form may also be adjusted to improve delivery of one or more active ingredients. Similarly, the polarity of a solvent carrier, its ionic strength, or tonicity can be adjusted to improve delivery. Compounds such as stearates can also be added to pharmaceutical compositions or dosage forms to advantageously alter the hydrophilicity or lipophilicity of one or more active ingredients so as to improve delivery. In this regard, stearates can serve as a lipid vehicle for the formulation, as an emulsifying agent or surfactant, and as a delivery-enhancing or penetration-enhancing agent. Different salts, hydrates or solvates of the active ingredients can be used to further adjust the properties of the resulting composition.

[0544] 5.5.3. Delayed Release Dosage Forms

[0545] In another embodiment, a pharmaceutical composition can be provided as a controlled release or sustained release system. In one embodiment, a pump may be used to achieve controlled or sustained release (see, e.g., Langer, supra; Sefton, 1987, Crit. Ref. Biomed. Eng. 14:201-40; Buchwald et al., 1980, Surgery 88:507-16; and Saudek et al., 1989, N. Engl. J. Med. 321:569-74). In another embodiment, polymeric materials can be used to achieve controlled or sustained release of a prophylactic or therapeutic agent (e.g., a fusion protein as described herein) or a composition provided herein (see, e.g., Medical Applications of Controlled Release (Langer and Wise eds., 1974); Controlled Drug Bioavailability, Drug Product Design and Performance (Smolen and Ball eds., 1984); Ranger and Peppas, 1983, J. Macromol. Sci. Rev. Macromol. Chem. 23:61-126; Levy et al., 1985, Science 228:190-92; During et al., 1989, Ann. Neurol. 25:351-56; Howard et al., 1989, J. Neurosurg. 71:105-12; U.S. Pat. Nos. 5,679,377; 5,916,597; 5,912,015; 5,989,463; and 5,128,326; PCT Publication Nos. WO 99/15154 and WO 99/20253). Examples of polymers used in sustained release formulations include, but are not limited to, poly(2-hydroxy ethyl methacrylate), poly(methyl methacrylate), poly(acrylic acid), poly(ethylene-co-vinyl acetate), poly(methacrylic acid), polyglycolides (PLG), polyanhydrides, poly(N-vinyl pyrrolidone), poly(vinyl alcohol), polyacrylamide, poly(ethylene glycol), polylactides (PLA), poly(lactide-co-glycolides) (PLGA), and polyorthoesters. In one embodiment, the polymer used in a sustained release formulation is inert, free of leachable impurities, stable on storage, sterile, and biodegradable.

[0546] In yet another embodiment, a controlled or sustained release system can be placed in proximity of a particular target tissue, for example, the nasal passages or lungs, thus requiring only a fraction of the systemic dose (see, e.g., Goodson, Medical Applications of Controlled Release Vol. 2, 115-38 (1984)). Controlled release systems are discussed, for example, by Langer, 1990, Science 249:1527-33. Any technique known to one of skill in the art can be used to produce sustained release formulations comprising one or more agents as described herein (see, e.g., U.S. Pat. No. 4,526,938, PCT publication Nos. WO 91/05548 and WO 96/20698, Ning et al., 1996, Radiotherapy & Oncology 39:179-89; Song et al., 1995, PDA J. of Pharma. Sci. & Tech. 50:372-97; Cleek et al., 1997, Pro. Int'l. Symp. Control. Rel. Bioact. Mater. 24:853-54; and Lam et al., 1997, Proc. Int'l. Symp. Control Rel. Bioact. Mater. 24:759-60).

### 5.6. Methods and Uses

[0547] In another aspect, provided herein is a method of increasing the rate of pIgR-mediated transcytosis (e.g., forward transcytosis and/or reverse transcytosis) across an epithelial cell, including, for example, as measured by any assays or models of forward transcytosis and/or reverse transcytosis as described herein. The method comprises contacting the cell with any VHH domain or therapeutic molecule comprising the VHH domain described herein. In some embodiments, the method does not inhibit pIgR-mediated transcytosis of IgA.

[0548] In another aspect is provided a method of modulating a function of pIgR in a cell, including, for example, as measured by any assays or models of pIgR function as described herein. The method comprises contacting the cell with any VHH domain described herein, or any molecule comprising a VHH domain and an agent (e.g., therapeutic molecule) described herein. In some embodiments, modulation is activation of the function of pIgR. In some embodiments, modulation is inhibition of the function of pIgR. In some embodiments, the cell is a mucosal epithelial cell. In some embodiments, the cell is a cancer cell. Exemplary cancer cells include, but are not limited to, a lung cancer cell, an esophageal cancer cell, a stomach cancer cell, a duodenal cancer cell, a liver cancer cell, a bladder cancer cell, a sinus cancer cell, a nasal cavity cancer cell, an endometrial cancer cell or a colorectal cancer cell. The cell may be in a subject. The molecule (e.g., therapeutic molecule) may comprise an antibody or fragment thereof, a peptide, a vaccine, a small molecule, a polynucleotide, a molecule comprising a radioactive isotope, a toxin, an enzyme, an anticoagulant, a hormone, a cytokine, an anti-inflammatory molecule, an RNAi, an mRNA, a self-replicating RNA, an antibiotic, and an antibody-antibiotic conjugate as described herein. In certain embodiments, the molecule (e.g., therapeutic molecule) comprises an antibiotic (e.g., a macrolide antibiotic, a fluoroquinolone, a tetracycline, amoxicillin, ceftriaxone, penicillin G, linezolid, moxifloxacin, or azithromycin.) The molecule may be administered to the bloodstream of the subject. In a specific embodiment, the molecule (e.g., therapeutic molecule) comprises a peptide. Exemplary peptides include, but are not limited to, an octreotide (e.g. Mycapssa), insulin or a derivative thereof (e.g. Capsulin OAD, ORMD-0801, Tregopil, HDV Insulin, Oshadi Icp, Dance 501, Exubera, Afrezza, Oral-lyn, MSL001-PH-2-1, NanoCelle Insulin), an insulin-mimic peptide, a semaglutide (e.g. NN9924), a leuprolide (e.g. Ovarest), a glucagon-like peptide 1 (e.g. TTP273), a glucagon-like-peptide-1-mimic peptides, an IL-23 receptor antagonist peptide (e.g., PTG-200), a salmon calcitonin (e.g. TBRIA), a desmopressin (e.g. DDAVP), a calcitonin (e.g. Miacalcin), an oxytocin (e.g. Syntocinon), and a nafarelin (e.g. Synarel). In a specific embodiment, the molecule (e.g., therapeutic molecule) comprises a vaccine. Exemplary vaccines are useful for preventing inventions, including infections from Vibrio, Cholera, Typhoid, Rotavirus, Tuberculosis, HIV, Flu, Ebola, and Sendai. Exemplary vaccines include, but are not limited to, connaught strain BCG (e.g. BCG vaccine), a live attenuated cholera vaccine (e.g. Vaxchora), a live attenuated Salmonella enterica subsp. enterica seravar typi Ty21a (e.g. Vivotif), a live, nonovalent, human attenuated rotavirus strain (e.g. Rotarix), a live pentavalent bovine attenuated rotarvirus strain (e.g. RotaTeq), a recombinant modified vaccinia virus Ankara expressing antigen 85A (MVA85A) (e.g. MVA85A), a live attenuated Bordetella pertussis (e.g. BPZE1), a flu vaccine (e.g. PUR003, INFLUSOME-VAC, FluMist Quadrivalent), a Tuberculosis vaccine (e.g. Ad5Ag85A, Tuberculosis vaccine), an HIV vaccine (e.g. EuroNeut41, HIV vaccine), an inactivated H5N1 influenza vaccine (e.g. GelVac), an RSVcps2 vaccine (e.g. Respiratory syncytial virus vaccine), a Shigellosis vaccine (e.g. Invaplex 50), an ebola vaccine (e.g. Ebola vaccine), and a Sendai vaccine (e.g. Sendai vaccine). In a specific embodiment, the molecule (e.g., therapeutic molecule) comprises an antibody or fragment thereof. Exemplary antibodies or fragments thereof include, but are not limited to, an antitumour necrosis factor antibody (e.g. AVX-470), an anti-TNF-alpha antibody (e.g., infliximab), an anti-IL23 antibody (e.g., guselkumab), an antibody that binds to a receptor of IL23, an anti-IL12 and anti-IL23 antibody (e.g., uspekinumab), muromonab (e.g. OKT3), a homeopathic antibody (e.g. TAO1), an anti-CD3 antibody (e.g. aCD3, TZLS-401), and an immunoglobulin Y egg yolk antibody (e.g. AGY). In a specific embodiment, the agent is a cytokine. Exemplary cytokines include, but are not limited to, interferon-α. In a specific embodiment, the molecule (e.g., therapeutic molecule) comprises is a hormone. Exemplary hormones include, but are not limited to, desmopressin (e.g. DDAVP). In a specific embodiment, the molecule (e.g., therapeutic molecule) comprises a small molecule. Exemplary small molecules include, but are not limited to, cyclosporin A (e.g. Neoral). The molecule may be administered intravenously or subcutaneously. The molecule may be administered by oral delivery, buccal delivery, nasal delivery or inhalation delivery, including for delivery to systemic circulation or lamina propria.

[0549] In another aspect is provided a method of delivering a molecule (e.g., a therapeutic molecule) to a pIgR-expressing cell, including, for example, as measured by any assays or models of delivery as described herein. The method comprises contacting the cell with any VHH domain and an agent (e.g., therapeutic molecule) described herein, or any molecule comprising a VHH domain and an agent (e.g., therapeutic molecule) described herein. In some embodiments, the cell is a mucosal epithelial cell. In some embodiments, the cell is a cancer cell. Exemplary cancer cells include, but are not limited to, a lung cancer cell, an esophageal cancer cell, a stomach cancer cell, a duodenal cancer cell, a liver cancer cell, a bladder cancer cell, a sinus cancer cell, a nasal cavity cancer cell, an endometrial cancer cell or a colorectal cancer cell. The cell may be in a subject. The molecule (e.g., therapeutic molecule) may comprise an antibody or fragment thereof, a peptide, a vaccine, a small molecule, a polynucleotide, a molecule comprising a radioactive isotope, a toxin, an enzyme, an anticoagulant, a hormone, a cytokine, an anti-inflammatory molecule, an RNAi, an mRNA, a self-replicating RNA, an antibiotic, and an antibody-antibiotic conjugate as described herein. In certain embodiments, the molecule (e.g., therapeutic molecule) comprises an antibiotic (e.g., a macrolide antibiotic, a fluoroquinolone, a tetracycline, amoxicillin, ceftriaxone, penicillin G, linezolid, moxifloxacin, or azithromycin). In a specific embodiment, the molecule (e.g., therapeutic molecule) comprises a peptide. Exemplary peptides include, but are not limited to, an octreotide (e.g. Mycapssa), insulin or a derivative thereof (e.g. Capsulin OAD, ORMD-0801, Tregopil, HDV Insulin, Oshadi Icp, Dance 501, Exubera, Afrezza, Oral-lyn, MSL001-PH-2-1, NanoCelle Insulin), an insulin-mimic peptide, a semaglutide (e.g. NN9924), a leuprolide (e.g. Ovarest), a glucagon-like peptide 1 (e.g. TTP273), a glucagon-like-peptide-1-mimic peptides, an IL-23 receptor antagonist peptide (e.g., PTG-200), a salmon calcitonin (e.g. TBRIA), a desmopressin (e.g. DDAVP), a calcitonin (e.g. Miacalcin), an oxytocin (e.g. Syntocinon), and a nafarelin (e.g. Synarel). In a specific embodiment, the molecule (e.g., therapeutic molecule) comprises a vaccine. Exemplary vaccines are useful for preventing inventions, including infections from Vibrio, Cholera, Typhoid, Rotavirus, Tuberculosis, HIV, Flu, Ebola, and Sendai. Exemplary vaccines include, but are not limited to, connaught strain BCG (e.g. BCG vaccine), a live attenuated cholera vaccine (e.g. Vaxchora), a live attenuated Salmonella enterica subsp. enterica seravar typi Ty21a (e.g. Vivotif), a live, nonovalent, human attenuated rotavirus strain (e.g. Rotarix), a live pentavalent bovine attenuated rotarvirus strain (e.g. RotaTeq), a recombinant modified vaccinia virus Ankara expressing antigen 85A (MVA85A) (e.g. MVA85A), a live attenuated Bordetella pertussis (e.g. BPZE1), a flu vaccine (e.g. PUR003, INFLUSOME-VAC, FluMist Quadrivalent), a Tuberculosis vaccine (e.g. Ad5Ag85A, Tuberculosis vaccine), an HIV vaccine (e.g. EuroNeut41, HIV vaccine), an inactivated H5N1 influenza vaccine (e.g. GelVac), an RSVcps2 vaccine (e.g. Respiratory syncytial virus vaccine), a Shigellosis vaccine (e.g. Invaplex 50), an ebola vaccine (e.g. Ebola vaccine), and a Sendai vaccine (e.g. Sendai vaccine). In a specific embodiment, the molecule (e.g., therapeutic molecule) comprises an antibody or fragment thereof. Exemplary antibodies or fragments thereof include, but are not limited to, an antitumour necrosis factor antibody (e.g. AVX-470), an anti-TNF-alpha antibody (e.g., infliximab), an anti-IL23 antibody (e.g., guselkumab), an antibody that binds to a receptor of IL23, an anti-IL12 and anti-IL23 antibody (e.g., uspekinumab), muromonab (e.g. OKT3), a homeopathic antibody (e.g. TAO1), an anti-CD3 antibody (e.g. aCD3, TZLS-401), and an immunoglobulin Y egg yolk antibody (e.g. AGY). In a specific embodiment, the agent is a cytokine. Exemplary cytokines include, but are not limited to, interferon-α. In a specific embodiment, the molecule (e.g., therapeutic molecule) comprises is a hormone. Exemplary hormones include, but are not limited to, desmopressin (e.g. DDAVP). In a specific embodiment, the molecule (e.g., therapeutic molecule) comprises a small molecule. Exemplary small molecules include, but are not limited to, cyclosporin A (e.g. Neoral). The molecule may be administered to the bloodstream of the subject. The molecule may be administered intravenously or subcutaneously. The molecule may be administered by oral delivery, buccal delivery, nasal delivery or inhalation delivery, including for delivery to systemic circulation or lamina propria.

[0550] In another aspect is provided a method of delivering a molecule (e.g., therapeutic molecule) to a mucosal lumen of a subject, including, for example, as measured by any assays or models of delivery as described herein. The method comprises administering to the subject any VHH domain and an agent (e.g., therapeutic molecule) described herein, or an effective amount of any VHH domain and an agent (e.g., therapeutic molecule) described herein. In a related aspect is provided a method for transporting small molecule and protein-based entities across the mucosal epithelial cell by exploiting pIgR-mediated transcytosis, including, for example, as measure by any assays or models of transport as described herein. In some embodiments, the cell is a mucosal epithelial cell. In some embodiments, the cell is a cancer cell. Exemplary cancer cells include, but are not limited to, a lung cancer cell, an esophageal cancer cell, a stomach cancer cell, a duodenal cancer cell, a liver cancer cell, a bladder cancer cell, a sinus cancer cell, a nasal cavity cancer cell, an endometrial cancer cell or a colorectal cancer cell. The cell may be in a subject. The molecule (e.g., therapeutic molecule) may comprise an antibody or fragment thereof, a peptide, a vaccine, a small molecule, a polynucleotide, a molecule comprising a radioactive isotope, a toxin, an enzyme, an anticoagulant, a hormone, a cytokine, an anti-inflammatory molecule, an RNAi, an mRNA, a self-replicating RNA, an antibiotic, and an antibody-antibiotic conjugate as described herein. In certain embodiments, the molecule (e.g., therapeutic molecule) comprises an antibiotic (e.g., a macrolide antibiotic, a fluoroquinolone, a tetracycline, amoxicillin, ceftriaxone, penicillin G, linezolid, moxifloxacin, or azithromycin). In a specific embodiment, the molecule (e.g., therapeutic molecule) comprises a peptide. Exemplary peptides include, but are not limited to, an octreotide (e.g. Mycapssa), insulin or a derivative thereof (e.g. Capsulin OAD, ORMD-0801, Tregopil, HDV Insulin, Oshadi Icp, Dance 501, Exubera, Afrezza, Oral-lyn, MSL001-PH-2-1, NanoCelle Insulin), an insulin-mimic peptide, a semaglutide (e.g. NN9924), a leuprolide (e.g. Ovarest), a glucagon-like peptide 1 (e.g. TTP273), a glucagon-like-peptide-1-mimic peptides, an IL-23 receptor antagonist peptide (e.g., PTG-200), a salmon calcitonin (e.g. TBRIA), a desmopressin (e.g. DDAVP), a calcitonin (e.g. Miacalcin), an oxytocin (e.g. Syntocinon), and a nafarelin (e.g. Synarel). In a specific embodiment, the molecule (e.g., therapeutic molecule) comprises a vaccine. Exemplary vaccines are useful for preventing inventions, including infections from Vibrio, Cholera, Typhoid, Rotavirus, Tuberculosis, HIV, Flu, Ebola, and Sendai. Exemplary vaccines include, but are not limited to, connaught strain BCG (e.g. BCG vaccine), a live attenuated cholera vaccine (e.g. Vaxchora), a live attenuated Salmonella enterica subsp. enterica seravar typi Ty21a (e.g. Vivotif), a live, nonovalent, human attenuated rotavirus strain (e.g. Rotarix), a live pentavalent bovine attenuated rotarvirus strain (e.g. RotaTeq), a recombinant modified vaccinia virus Ankara expressing antigen 85A (MVA85A) (e.g. MVA85A), a live attenuated Bordetella pertussis (e.g. BPZE1), a flu vaccine (e.g. PUR003, INFLUSOME-VAC, FluMist Quadrivalent), a Tuberculosis vaccine (e.g. Ad5Ag85A, Tuberculosis vaccine), an HIV vaccine (e.g. EuroNeut41, HIV vaccine), an inactivated H5N1 influenza vaccine (e.g. GelVac), an RSVcps2 vaccine (e.g. Respiratory syncytial virus vaccine), a Shigellosis vaccine (e.g. Invaplex 50), an ebola vaccine (e.g. Ebola vaccine), and a Sendai vaccine (e.g. Sendai vaccine). In a specific embodiment, the molecule (e.g., therapeutic molecule) comprises an antibody or fragment thereof. Exemplary antibodies or fragments thereof include, but are not limited to, an antitumour necrosis factor antibody (e.g. AVX-470), an anti-TNF-alpha antibody (e.g., infliximab), an anti-IL23 antibody (e.g., guselkumab), an antibody that binds to a receptor of IL23, an anti-IL12 and anti-IL23 antibody (e.g., uspekinumab), muromonab (e.g. OKT3), a homeopathic antibody (e.g. TAO1), an anti-CD3 antibody (e.g. aCD3, TZLS-401), and an immunoglobulin Y egg yolk antibody (e.g. AGY). In a specific embodiment, the agent is a cytokine. Exemplary cytokines include, but are not limited to, interferon-α. In a specific embodiment, the molecule (e.g., therapeutic molecule) comprises is a hormone. Exemplary hormones include, but are not limited to, desmopressin (e.g. DDAVP). In a specific embodiment, the molecule (e.g., therapeutic molecule) comprises a small molecule. Exemplary small molecules include, but are not limited to, cyclosporin A (e.g. Neoral). The molecule may be administered to the bloodstream of the subject. The molecule may be administered intravenously or subcutaneously. The molecule may be administered by oral delivery, buccal delivery, nasal delivery or inhalation delivery, including for delivery to systemic circulation or lamina propria.

[0551] The schematic shown in FIG. 1B illustrates how molecules binding to the stalk region of the pIgR ectodomain (any artificial ligand) can transcytose the epithelial cell from the apical to the basolateral direction and reach the blood from mucosal lumen.

[0552] In another aspect is provided a method of delivering a molecule to a mucosal lumen of a subject, including, for example, as measured by any assays or models of delivery as described herein. The method comprises administering to the subject any VHH domain and an agent (e.g., therapeutic molecule) described herein, or an effective amount of any VHH domain and an agent (e.g., therapeutic molecule) described herein. In certain embodiments, the mucosal lumen is in the lung or in the gastrointestinal tract of the subject. The molecule (e.g. therapeutic molecule) may comprise an antibody or fragment thereof, a peptide, a vaccine, a small molecule, a polynucleotide, a molecule comprising a radioactive isotope, a toxin, an enzyme, an anticoagulant, a hormone, a cytokine, an anti-inflammatory molecule, an RNAi, an mRNA, a self-replicating RNA, an antibiotic, and an antibody-antibiotic conjugate as described herein. In certain embodiments, the molecule (e.g., therapeutic molecule) comprises an antibiotic (e.g., a macrolide antibiotic, a fluoroquinolone, a tetracycline, amoxicillin, ceftriaxone, penicillin G, linezolid, moxifloxacin, or azithromycin.) The molecule (e.g., therapeutic molecule) may comprise an antibody or fragment thereof, a peptide, a vaccine, a small molecule, a polynucleotide, a molecule comprising a radioactive isotope, a toxin, an enzyme, an anticoagulant, a hormone, a cytokine, an anti-inflammatory molecule, an RNAi, an mRNA, a self-replicating RNA, an antibiotic, and an antibody-antibiotic conjugate as described herein. In certain embodiments, the molecule (e.g., therapeutic molecule) comprises an antibiotic (e.g., a macrolide antibiotic, a fluoroquinolone, a tetracycline, amoxicillin, ceftriaxone, penicillin G, linezolid, moxifloxacin, or azithromycin). In a specific embodiment, the molecule (e.g., therapeutic molecule) comprises a peptide. Exemplary peptides include, but are not limited to, an octreotide (e.g. Mycapssa), insulin or a derivative thereof (e.g. Capsulin OAD, ORMD-0801, Tregopil, HDV Insulin, Oshadi Icp, Dance 501, Exubera, Afrezza, Oral-lyn, MSL001-PH-2-1, NanoCelle Insulin), an insulin-mimic peptide, a semaglutide (e.g. NN9924), a leuprolide (e.g. Ovarest), a glucagon-like peptide 1 (e.g. TTP273), a glucagon-like-peptide-1-mimic peptides, an IL-23 receptor antagonist peptide (e.g., PTG-200), a salmon calcitonin (e.g. TBRIA), a desmopressin (e.g. DDAVP), a calcitonin (e.g. Miacalcin), an oxytocin (e.g. Syntocinon), and a nafarelin (e.g. Synarel). In a specific embodiment, the molecule (e.g., therapeutic molecule) comprises a vaccine. Exemplary vaccines are useful for preventing inventions, including infections from Vibrio, Cholera, Typhoid, Rotavirus, Tuberculosis, HIV, Flu, Ebola, and Sendai. Exemplary vaccines include, but are not limited to, connaught strain BCG (e.g. BCG vaccine), a live attenuated cholera vaccine (e.g. Vaxchora), a live attenuated Salmonella enterica subsp. enterica seravar typi Ty21a (e.g. Vivotif), a live, nonovalent, human attenuated rotavirus strain (e.g. Rotarix), a live pentavalent bovine attenuated rotarvirus strain (e.g. RotaTeq), a recombinant modified vaccinia virus Ankara expressing antigen 85A (MVA85A) (e.g. MVA85A), a live attenuated Bordetella pertussis (e.g. BPZE1), a flu vaccine (e.g. PUR003, INFLUSOME-VAC, FluMist Quadrivalent), a Tuberculosis vaccine (e.g. Ad5Ag85A, Tuberculosis vaccine), an HIV vaccine (e.g. EuroNeut41, HIV vaccine), an inactivated H5N1 influenza vaccine (e.g. GelVac), an RSVcps2 vaccine (e.g. Respiratory syncytial virus vaccine), a Shigellosis vaccine (e.g. Invaplex 50), an ebola vaccine (e.g. Ebola vaccine), and a Sendai vaccine (e.g. Sendai vaccine). In a specific embodiment, the molecule (e.g., therapeutic molecule) comprises an antibody or fragment thereof. Exemplary antibodies or fragments thereof include, but are not limited to, an antitumour necrosis factor antibody (e.g. AVX-470), an anti-TNF-alpha antibody (e.g., infliximab), an anti-IL23 antibody (e.g., guselkumab), an antibody that binds to a receptor of IL23, an anti-IL12 and anti-IL23 antibody (e.g., uspekinumab), muromonab (e.g. OKT3), a homeopathic antibody (e.g. TAO1), an anti-CD3 antibody (e.g. aCD3, TZLS-401), and an immunoglobulin Y egg yolk antibody (e.g. AGY). In a specific embodiment, the agent is a cytokine. Exemplary cytokines include, but are not limited to, interferon-α. In a specific embodiment, the molecule (e.g., therapeutic molecule) comprises is a hormone. Exemplary hormones include, but are not limited to, desmopressin (e.g. DDAVP). In a specific embodiment, the molecule (e.g., therapeutic molecule) comprises a small molecule. Exemplary small molecules include, but are not limited to, cyclosporin A (e.g. Neoral). The molecule may be administered to the bloodstream of the subject. The molecule may be administered intravenously or subcutaneously. The molecule may be administered by oral delivery, buccal delivery, nasal delivery or inhalation delivery, including for delivery to systemic circulation or lamina propria.

[0553] In another aspect is provided a method of delivering a molecule to an organ of a subject, including, for example, as measured by any assays or models of delivery as described herein. The method comprises administering to the subject any VHH domain and an agent (e.g., therapeutic molecule) described herein, or an effective amount of any VHH domain and an agent (e.g., therapeutic molecule) described herein. The organ may be the small intestine, large intestine, stomach, esophagus, salivary gland, lung, vagina, uterus, or lacrimal gland. In specific embodiments, the organ is a lung. The molecule (e.g., therapeutic molecule) may comprise an antibody or fragment thereof, a peptide, a vaccine, a small molecule, a polynucleotide, a molecule comprising a radioactive isotope, a toxin, an enzyme, an anticoagulant, a hormone, a cytokine, an anti-inflammatory molecule, an RNAi, an mRNA, a self-replicating RNA, an antibiotic, and an antibody-antibiotic conjugate as described herein. In certain embodiments, the molecule (e.g., therapeutic molecule) comprises an antibiotic (e.g., a macrolide antibiotic, a fluoroquinolone, a tetracycline, amoxicillin, ceftriaxone, penicillin G, linezolid, moxifloxacin, or azithromycin.) The molecule may be administered to the bloodstream of the subject. In a specific embodiment, the molecule (e.g., therapeutic molecule) comprises a peptide. Exemplary peptides include, but are not limited to, an octreotide (e.g. Mycapssa), insulin or a derivative thereof (e.g. Capsulin OAD, ORMD-0801, Tregopil, HDV Insulin, Oshadi Icp, Dance 501, Exubera, Afrezza, Oral-lyn, MSL001-PH-2-1, NanoCelle Insulin), an insulin-mimic peptide, a semaglutide (e.g. NN9924), a leuprolide (e.g. Ovarest), a glucagon-like peptide 1 (e.g. TTP273), a glucagon-like-peptide-1-mimic peptides, an IL-23 receptor antagonist peptide (e.g., PTG-200), a salmon calcitonin (e.g. TBRIA), a desmopressin (e.g. DDAVP), a calcitonin (e.g. Miacalcin), an oxytocin (e.g. Syntocinon), and a nafarelin (e.g. Synarel). In a specific embodiment, the molecule (e.g., therapeutic molecule) comprises a vaccine. Exemplary vaccines are useful for preventing inventions, including infections from Vibrio, Cholera, Typhoid, Rotavirus, Tuberculosis, HIV, Flu, Ebola, and Sendai. Exemplary vaccines include, but are not limited to, connaught strain BCG (e.g. BCG vaccine), a live attenuated cholera vaccine (e.g. Vaxchora), a live attenuated Salmonella enterica subsp. enterica seravar typi Ty21a (e.g. Vivotif), a live, nonovalent, human attenuated rotavirus strain (e.g. Rotarix), a live pentavalent bovine attenuated rotarvirus strain (e.g. RotaTeq), a recombinant modified vaccinia virus Ankara expressing antigen 85A (MVA85A) (e.g. MVA85A), a live attenuated Bordetella pertussis (e.g. BPZE1), a flu vaccine (e.g. PUR003, INFLUSOME-VAC, FluMist Quadrivalent), a Tuberculosis vaccine (e.g. Ad5Ag85A, Tuberculosis vaccine), an HIV vaccine (e.g. EuroNeut41, HIV vaccine), an inactivated H5N1 influenza vaccine (e.g. GelVac), an RSVcps2 vaccine (e.g. Respiratory syncytial virus vaccine), a Shigellosis vaccine (e.g. Invaplex 50), an ebola vaccine (e.g. Ebola vaccine), and a Sendai vaccine (e.g. Sendai vaccine). In a specific embodiment, the molecule (e.g., therapeutic molecule) comprises an antibody or fragment thereof. Exemplary antibodies or fragments thereof include, but are not limited to, an antitumour necrosis factor antibody (e.g. AVX-470), an anti-TNF-alpha antibody (e.g., infliximab), an anti-IL23 antibody (e.g., guselkumab), an antibody that binds to a receptor of IL23, an anti-IL12 and anti-IL23 antibody (e.g., uspekinumab), muromonab (e.g. OKT3), a homeopathic antibody (e.g. TAO1), an anti-CD3 antibody (e.g. aCD3, TZLS-401), and an immunoglobulin Y egg yolk antibody (e.g. AGY). In a specific embodiment, the agent is a cytokine. Exemplary cytokines include, but are not limited to, interferon-α. In a specific embodiment, the molecule (e.g., therapeutic molecule) comprises is a hormone. Exemplary hormones include, but are not limited to, desmopressin (e.g. DDAVP). In a specific embodiment, the molecule (e.g., therapeutic molecule) comprises a small molecule. Exemplary small molecules include, but are not limited to, cyclosporin A (e.g. Neoral). The molecule may be administered intravenously or subcutaneously. The molecule may be administered by oral delivery, buccal delivery, nasal delivery or inhalation delivery, including for delivery to systemic circulation or lamina propria.

[0554] In another aspect is provided a method of delivering a molecule to systemic circulation in a subject, including, for example, as measured by any assays or models of delivery as described herein. The method comprises administering to the subject any VHH domain and an agent (e.g., therapeutic molecule) described herein, or an effective amount of any molecule comprising a VHH domain and an agent (e.g., therapeutic molecule) described herein. The molecule (e.g. therapeutic molecule) may comprise an antibody or fragment thereof, a peptide, a vaccine, a small molecule, a polynucleotide, a molecule comprising a radioactive isotope, a toxin, an enzyme, an anticoagulant, a hormone, a cytokine, an anti-inflammatory molecule, an RNAi, an mRNA, a self-replicating RNA, an antibiotic, and an antibody-antibiotic conjugate as described herein. In certain embodiments, the molecule (e.g., therapeutic molecule) comprises an antibiotic (e.g., a macrolide antibiotic, a fluoroquinolone, a tetracycline, amoxicillin, ceftriaxone, penicillin G, linezolid, moxifloxacin, or azithromycin.) The molecule (e.g., therapeutic molecule) may comprise an antibody or fragment thereof, a peptide, a vaccine, a small molecule, a polynucleotide, a molecule comprising a radioactive isotope, a toxin, an enzyme, an anticoagulant, a hormone, a cytokine, an anti-inflammatory molecule, an RNAi, an mRNA, a self-replicating RNA, an antibiotic, and an antibody-antibiotic conjugate as described herein. In certain embodiments, the molecule (e.g., therapeutic molecule) comprises an antibiotic (e.g., a macrolide antibiotic, a fluoroquinolone, a tetracycline, amoxicillin, ceftriaxone, penicillin G, linezolid, moxifloxacin, or azithromycin). In a specific embodiment, the molecule (e.g., therapeutic molecule) comprises a peptide. Exemplary peptides include, but are not limited to, an octreotide (e.g. Mycapssa), insulin or a derivative thereof (e.g. Capsulin OAD, ORMD-0801, Tregopil, HDV Insulin, Oshadi Icp, Dance 501, Exubera, Afrezza, Oral-lyn, MSL001-PH-2-1, NanoCelle Insulin), an insulin-mimic peptide, a semaglutide (e.g. NN9924), a leuprolide (e.g. Ovarest), a glucagon-like peptide 1 (e.g. TTP273), a glucagon-like-peptide-1-mimic peptides, an IL-23 receptor antagonist peptide (e.g., PTG-200), a salmon calcitonin (e.g. TBRIA), a desmopressin (e.g. DDAVP), a calcitonin (e.g. Miacalcin), an oxytocin (e.g. Syntocinon), and a nafarelin (e.g. Synarel). In a specific embodiment, the molecule (e.g., therapeutic molecule) comprises a vaccine. Exemplary vaccines are useful for preventing inventions, including infections from Vibrio, Cholera, Typhoid, Rotavirus, Tuberculosis, HIV, Flu, Ebola, and Sendai. Exemplary vaccines include, but are not limited to, connaught strain BCG (e.g. BCG vaccine), a live attenuated cholera vaccine (e.g. Vaxchora), a live attenuated Salmonella enterica subsp. enterica seravar typi Ty21a (e.g. Vivotif), a live, nonovalent, human attenuated rotavirus strain (e.g. Rotarix), a live pentavalent bovine attenuated rotarvirus strain (e.g. RotaTeq), a recombinant modified vaccinia virus Ankara expressing antigen 85A (MVA85A) (e.g. MVA85A), a live attenuated Bordetella pertussis (e.g. BPZE1), a flu vaccine (e.g. PUR003, INFLUSOME-VAC, FluMist Quadrivalent), a Tuberculosis vaccine (e.g. Ad5Ag85A, Tuberculosis vaccine), an HIV vaccine (e.g. EuroNeut41, HIV vaccine), an inactivated H5N1 influenza vaccine (e.g. GelVac), an RSVcps2 vaccine (e.g. Respiratory syncytial virus vaccine), a Shigellosis vaccine (e.g. Invaplex 50), an ebola vaccine (e.g. Ebola vaccine), and a Sendai vaccine (e.g. Sendai vaccine). In a specific embodiment, the molecule (e.g., therapeutic molecule) comprises an antibody or fragment thereof. Exemplary antibodies or fragments thereof include, but are not limited to, an antitumour necrosis factor antibody (e.g. AVX-470), an anti-TNF-alpha antibody (e.g., infliximab), an anti-IL23 antibody (e.g., guselkumab), an antibody that binds to a receptor of IL23, an anti-IL12 and anti-IL23 antibody (e.g., uspekinumab), muromonab (e.g. OKT3), a homeopathic antibody (e.g. TAO1), an anti-CD3 antibody (e.g. aCD3, TZLS-401), and an immunoglobulin Y egg yolk antibody (e.g. AGY). In a specific embodiment, the agent is a cytokine. Exemplary cytokines include, but are not limited to, interferon-α. In a specific embodiment, the molecule (e.g., therapeutic molecule) comprises is a hormone. Exemplary hormones include, but are not limited to, desmopressin (e.g. DDAVP). In a specific embodiment, the molecule (e.g., therapeutic molecule) comprises a small molecule. Exemplary small molecules include, but are not limited to, cyclosporin A (e.g. Neoral). The molecule may be administered to the bloodstream of the subject. The molecule may be administered intravenously or subcutaneously. The molecule may be administered by oral delivery, buccal delivery, nasal delivery or inhalation delivery, including for delivery to systemic circulation or lamina propria.

[0555] In another aspect is provided a method of delivering a molecule to lamina propria of a subject, including, for example, as measured by any assays or models of delivery as described herein. The method comprises administering to the subject any VHH domain and an agent (e.g., therapeutic molecule) described herein, or an effective amount of any a VHH domain and an agent (e.g., therapeutic molecule) described herein. The molecule (e.g. therapeutic molecule) may comprise an antibody or fragment thereof, a peptide, a vaccine, a small molecule, a polynucleotide, a molecule comprising a radioactive isotope, a toxin, an enzyme, an anticoagulant, a hormone, a cytokine, an anti-inflammatory molecule, an RNAi, an mRNA, a self-replicating RNA, an antibiotic, and an antibody-antibiotic conjugate as described herein. In certain embodiments, the molecule (e.g., therapeutic molecule) comprises an antibiotic (e.g., a macrolide antibiotic, a fluoroquinolone, a tetracycline, amoxicillin, ceftriaxone, penicillin G, linezolid, moxifloxacin, or azithromycin.) The molecule (e.g., therapeutic molecule) may comprise an antibody or fragment thereof, a peptide, a vaccine, a small molecule, a polynucleotide, a molecule comprising a radioactive isotope, a toxin, an enzyme, an anticoagulant, a hormone, a cytokine, an anti-inflammatory molecule, an RNAi, an mRNA, a self-replicating RNA, an antibiotic, and an antibody-antibiotic conjugate as described herein. In certain embodiments, the molecule (e.g., therapeutic molecule) comprises an antibiotic (e.g., a macrolide antibiotic, a fluoroquinolone, a tetracycline, amoxicillin, ceftriaxone, penicillin G, linezolid, moxifloxacin, or azithromycin). In a specific embodiment, the molecule (e.g., therapeutic molecule) comprises a peptide. Exemplary peptides include, but are not limited to, an octreotide (e.g. Mycapssa), insulin or a derivative thereof (e.g. Capsulin OAD, ORMD-0801, Tregopil, HDV Insulin, Oshadi Icp, Dance 501, Exubera, Afrezza, Oral-lyn, MSL001-PH-2-1, NanoCelle Insulin), an insulin-mimic peptide, a semaglutide (e.g. NN9924), a leuprolide (e.g. Ovarest), a glucagon-like peptide 1 (e.g. TTP273), a glucagon-like-peptide-1-mimic peptides, an IL-23 receptor antagonist peptide (e.g., PTG-200), a salmon calcitonin (e.g. TBRIA), a desmopressin (e.g. DDAVP), a calcitonin (e.g. Miacalcin), an oxytocin (e.g. Syntocinon), and a nafarelin (e.g. Synarel). In a specific embodiment, the molecule (e.g., therapeutic molecule) comprises a vaccine. Exemplary vaccines are useful for preventing inventions, including infections from Vibrio, Cholera, Typhoid, Rotavirus, Tuberculosis, HIV, Flu, Ebola, and Sendai. Exemplary vaccines include, but are not limited to, connaught strain BCG (e.g. BCG vaccine), a live attenuated cholera vaccine (e.g. Vaxchora), a live attenuated Salmonella enterica subsp. enterica seravar typi Ty21a (e.g. Vivotif), a live, nonovalent, human attenuated rotavirus strain (e.g. Rotarix), a live pentavalent bovine attenuated rotarvirus strain (e.g. RotaTeq), a recombinant modified vaccinia virus Ankara expressing antigen 85A (MVA85A) (e.g. MVA85A), a live attenuated Bordetella pertussis (e.g. BPZE1), a flu vaccine (e.g. PUR003, INFLUSOME-VAC, FluMist Quadrivalent), a Tuberculosis vaccine (e.g. Ad5Ag85A, Tuberculosis vaccine), an HIV vaccine (e.g. EuroNeut41, HIV vaccine), an inactivated H5N1 influenza vaccine (e.g. GelVac), an RSVcps2 vaccine (e.g. Respiratory syncytial virus vaccine), a Shigellosis vaccine (e.g. Invaplex 50), an ebola vaccine (e.g. Ebola vaccine), and a Sendai vaccine (e.g. Sendai vaccine). In a specific embodiment, the molecule (e.g., therapeutic molecule) comprises an antibody or fragment thereof. Exemplary antibodies or fragments thereof include, but are not limited to, an antitumour necrosis factor antibody (e.g. AVX-470), an anti-TNF-alpha antibody (e.g., infliximab), an anti-IL23 antibody (e.g., guselkumab), an antibody that binds to a receptor of IL23, an anti-IL12 and anti-IL23 antibody (e.g., uspekinumab), muromonab (e.g. OKT3), a homeopathic antibody (e.g. TAO1), an anti-CD3 antibody (e.g. aCD3, TZLS-401), and an immunoglobulin Y egg yolk antibody (e.g. AGY). In a specific embodiment, the agent is a cytokine. Exemplary cytokines include, but are not limited to, interferon-α. In a specific embodiment, the molecule (e.g., therapeutic molecule) comprises is a hormone. Exemplary hormones include, but are not limited to, desmopressin (e.g. DDAVP). In a specific embodiment, the molecule (e.g., therapeutic molecule) comprises a small molecule. Exemplary small molecules include, but are not limited to, cyclosporin A (e.g. Neoral). The molecule may be administered to the bloodstream of the subject. The molecule may be administered intravenously or subcutaneously. The molecule may be administered by oral delivery, buccal delivery, nasal delivery or inhalation delivery, including for delivery to systemic circulation or lamina propria.

[0556] The VHH domains and molecules comprising VHH domains (e.g., therapeutic molecules, including conjugates, such as bioconjugates) described herein may be used to deliver cytokines and anti-inflammatory antibodies into lung mucosa for immunology indications (asthma), delivery of anti-inflammatory antibodies into intestinal mucosa for Intestinal bowel disease and Ulcerative colitis, delivery of antibody-antibiotic conjugates for clearing mucosal infections, pIgR-mediated increase in the biodistribution of endometrial and colorectal cancer targeting biologics in mucosa, and radiolabeled VHH-Fc molecules for mucosal PET-CT imaging.

[0557] The VHH domains and molecules comprising VHH domains (e.g., therapeutic molecules, including conjugates, such as bioconjugates) described herein may be used to improve the stability and PK for oral delivery of anti-inflammatory antibodies for Intestinal bowel disease and Ulcerative colitis. The VHH domain may be co-administered with the anti-inflammatory antibody. The VHH domain may also be conjugated, chemically or genetically, to the anti-inflammatory antibody. VHH domains or molecules comprising a VHH domain and an agent (e.g., therapeutic molecules) described herein be used for testing unexplored diagnostic and therapeutic applications in the pIgR space, such as delivery of cytokines and anti-inflammatory antibodies into lung for immunology indications, delivery of antibody-antibiotic conjugates for clearing mucosal infections, pIgR-mediated increase in the biodistribution of endometrial and colorectal cancer targeting biologics in mucosa, and radiolabeled VHH-Fc molecules for mucosal imaging.

[0558] The single domain antibodies (e.g., VHH domains) provided herein are useful for transporting an agent from an apical surface of a pIgR-expressing cell to a basolateral surface of the pIgR-expressing cell, and can deliver the agent, e.g., to systemic circulation or lamina propria or gastrointestinal tract of a subject, via methods such as oral delivery, buccal delivery, nasal delivery or inhalation delivery.

[0559] Thus, in some embodiments, provided herein is a method for delivering from an apical surface of a pIgR-expressing cell to a basolateral surface of the pIgR-expressing cell comprising contacting the pIgR-expressing cell with (i) a single domain antibody that binds to pIgR provided herein, or (ii) a therapeutic molecule comprising an agent and the single domain antibody.

[0560] In some embodiments, provide herein is a single domain antibody that binds to pIgR provided herein for use in delivering an agent from an apical surface of a pIgR-expressing cell to a basolateral surface of the pIgR-expressing cell, wherein the agent is conjugated to the single domain antibody.

[0561] In some embodiments, provided herein is a use of a single domain antibody that binds to pIgR provided herein for delivering an agent from an apical surface of a pIgR-expressing cell to a basolateral surface of the pIgR-expressing cell, wherein the agent is conjugated to the single domain antibody.

[0562] In other embodiments, provided herein is a method for transporting a therapeutic molecule to a basolateral surface of the pIgR-expressing cell of a subject, comprising administering to the subject the therapeutic molecule comprising an agent and a VHH domain. In some embodiments, the therapeutic molecule is administered to the subject via oral delivery, buccal delivery, nasal delivery or inhalation delivery.

[0563] In other embodiments, provided herein is a single domain antibody for use in transporting a therapeutic molecule to a basolateral surface of the pIgR-expressing cell of a subject, wherein the therapeutic molecule comprises an agent and the single domain antibody. In some embodiments, the therapeutic molecule is administered to the subject via oral delivery, buccal delivery, nasal delivery or inhalation delivery.

[0564] In other embodiments, provided herein is a use of a single domain antibody for transporting a therapeutic molecule to a basolateral surface of the pIgR-expressing cell of a subject, wherein the therapeutic molecule comprises an agent and the single domain antibody. In some embodiments, the therapeutic molecule is administered to the subject via oral delivery, buccal delivery, nasal delivery or inhalation delivery.

[0565] In yet other embodiments, provided herein is a method for transporting a therapeutic molecule to systemic circulation of a subject, comprising administering to the subject the therapeutic molecule comprising an agent and a single domain antibody, wherein the therapeutic molecule is administered to the subject via oral delivery, buccal delivery, nasal delivery or inhalation delivery.

[0566] In yet other embodiments, provided herein is a single domain antibody for use in transporting a therapeutic molecule to systemic circulation of a subject, wherein the therapeutic molecule comprises the single domain antibody and an agent, and wherein the therapeutic molecule is administered to the subject via oral delivery, buccal delivery, nasal delivery or inhalation delivery.

[0567] In yet other embodiments, provided herein is a use of VHH for transporting a therapeutic molecule to systemic circulation of a subject, wherein the therapeutic molecule comprises the single domain antibody and an agent, and wherein the therapeutic molecule is administered to the subject via oral delivery, buccal delivery, nasal delivery or inhalation delivery.

[0568] In yet other embodiments, provided herein is a method for transporting a therapeutic molecule to lamina propria or gastrointestinal tract of a subject, comprising administering to the subject the therapeutic molecule comprising an agent and a single domain antibody, wherein the therapeutic molecule is administered to the subject via oral delivery, buccal delivery, nasal delivery or inhalation delivery.

[0569] In yet other embodiments, provided herein is a single domain antibody for use in transporting a therapeutic molecule to lamina propria or gastrointestinal tract of a subject, wherein the therapeutic molecule comprises an agent and the single domain antibody, and wherein the therapeutic molecule is administered to the subject via oral delivery, buccal delivery, nasal delivery or inhalation delivery.

[0570] In yet other embodiments, provided herein is a use of a single domain antibody for transporting a therapeutic molecule to lamina propria or gastrointestinal tract of a subject, wherein the therapeutic molecule comprises an agent and the single domain antibody, and wherein the therapeutic molecule is administered to the subject via oral delivery, buccal delivery, nasal delivery or inhalation delivery.

[0571] In some embodiments of the various methods and uses provided herein, the therapeutic agent is transported from an apical surface of a pIgR-expressing cell to a basolateral surface of the pIgR-expressing cell in the subject.

[0572] In some embodiments, the single domain antibody or the therapeutic molecule comprising an agent and the single domain antibody is also capable of being transported from the basolateral surface of the pIgR-expressing cell to the apical surface of the pIgR-expressing cell.

[0573] In yet other embodiments, provided herein is a method of treating a disease or disorder comprising administering a therapeutic molecule comprising an agent and the single domain antibody provided herein to a subject, wherein optionally the therapeutic molecule is administered to the subject via oral delivery, buccal delivery, nasal delivery or inhalation delivery.

[0574] In yet other embodiments, provided herein is a therapeutic molecule comprising an agent and a single domain antibody provided herein for use in treating a disease or disorder in subject, wherein optionally the therapeutic molecule is administered to the subject via oral delivery, buccal delivery, nasal delivery or inhalation delivery.

[0575] In yet other embodiments, provided herein is a use of a therapeutic molecule comprising an agent and a single domain antibody provided herein for treating a disease or disorder in subject, wherein optionally the therapeutic molecule is administered to the subject via oral delivery, buccal delivery, nasal delivery or inhalation delivery.

[0576] In some embodiments, the disease or disorder is a metabolic disease or disorder. In some embodiments, the disease or disorder is diabetes. In some embodiments, the disease or disorder is cancer. In other embodiments, the disease or disorder is an immune disease or disorder. In some embodiments, the disease or disorder is a gastrointestinal disease. In some embodiments, the disease or disorder is gastrointestinal inflammation. In some embodiments, the disease or disorder is inflammatory bowel disease (IBD). In some embodiments, the disease or disorder is Crohn's disease (CD). In some embodiments, the disease or disorder is ulcerative colitis (UC). In some embodiments, the disease or disorder is ankylosing spondylitis (AS). In some embodiments, the disease or disorder is colitis.

[0577] For example, the single domain antibodies of the disclosure may be conjugated to any agent that can be used to treat or ameliorate symptoms of intestinal inflammation, IBD, UC or AS, including agents which are inhibitors of pro-inflammatory cytokines, inhibitors of Th17 cell activation and/or differentiation, molecules inhibiting lymphocyte trafficking or adhesion, modulators of innate immune system, modulators of macrophages, dendritic cells, regulatory T cells (Treg) or effector CD8⁺ or CD4⁺ T cells. Such exemplary agents include inhibitors of TNF-α IL-12, IL-6, IL-13, IL-17A, IL17A/F, IL-18, IL-21, modulators of TLR3 or TLR4 pathway, TNF-α inhibitors infliximab, adalimumab, certolizumab, golimumab, etanercept and biosimilars thereof, IL-23 inhibitors ustekinumab, risankizumab, brazikumab and mirikizumab, IL-23 receptor inhibitors, IL-17 inhibitor secukinumab, IL-6 inhibitors tocilizumab and PF-04236921, PDE4 inhibitor apermilast, JAK inhibitors tocacifinib, filgotinib, upadacitinib or peficiting, inhibitors of cell adhesion such as natalizumab, vedolizumab, etrolizumab, abrilumab, PF-00547659, integrin antagonists or sphingosine 1 phosphate receptor modulators, or agents enhancing production of IL-10. In some embodiments, the agent is an inhibitor of IL-23 receptor. The agent targeting pathogenic pathways in intestinal inflammation herein may be a known molecule, a variant or a fragment of the known molecule, or generated de novo and genetically fused or chemically conjugated to the single domain antibody of the disclosure using known methods and those described herein.

[0578] In some embodiments, the methods or uses provided here are for delivering a vaccine for preventing an infection, such as Vibrio, Cholera, Typhoid, Rotavirus, Tuberculosis, HIV, Flu, Ebola, and Sendai.

[0579] In some embodiments of the various methods and uses provided herein, the agent in the therapeutic molecule comprises a peptide. In some embodiments of the various methods and uses provided herein, the agent in the therapeutic molecule comprises an antibody or a fragment thereof. In some embodiments of the various methods and uses provided herein, the agent in the therapeutic molecule comprises a peptide conjugated to a small molecule compound (e.g., antibody drug conjugate). In some embodiments of the various methods and uses provided herein, the agent in the therapeutic molecule comprises a nucleic acid. In some embodiments of the various methods and uses provided herein, the agent in the therapeutic molecule comprises a vaccine.

[0580] The amount of a prophylactic or therapeutic agent (e.g., an antibody or therapeutic molecule), or a composition provided herein that will be effective in the prevention and/or treatment of a disease or condition can be determined by standard clinical techniques. In addition, in vitro assays may optionally be employed to help identify optimal dosage ranges. The precise dose to be employed in the formulation will also depend on the route of administration, and the seriousness of a disease or condition, and should be decided according to the judgment of the practitioner and each patient's circumstances.

[0581] Effective doses may be extrapolated from dose-response curves derived from in vitro or animal model test systems. In certain embodiments, the route of administration for a dose of an antibody or therapeutic molecule provided herein to a patient is oral delivery, buccal delivery, nasal delivery, inhalation delivery, or a combination thereof, but other routes may be also acceptable. Each dose may or may not be administered by an identical route of administration. In some embodiments, an antibody or therapeutic molecule provided herein may be administered via multiple routes of administration simultaneously or subsequently to other doses of the same or a different agent provided herein.

[0582] For the sake of conciseness, certain abbreviations are used herein. One example is the single letter abbreviation to represent amino acid residues. The amino acids and their corresponding three letter and single letter abbreviations are as follows:

| | | |
|---|---|---|
| alanine | Ala | (A) |
| arginine | Arg | (R) |
| asparagine | Asn | (N) |
| aspartic acid | Asp | (D) |
| cysteine | Cys | (C) |
| glutamic acid | Glu | (E) |
| glutamine | Gln | (Q) |
| glycine | Gly | (G) |
| histidine | His | (H) |
| isoleucine | Ile | (I) |
| leucine | Leu | (L) |
| lysine | Lys | (K) |
| methionine | Met | (M) |
| phenylalanine | Phe | (F) |
| proline | Pro | (P) |
| serine | Ser | (S) |
| threonine | Thr | (T) |
| tryptophan | Trp | (W) |
| tyrosine | Tyr | (Y) |
| valine | Val | (V) |

[0583] The disclosure is generally disclosed herein using affirmative language to describe the numerous embodiments. The disclosure also specifically includes embodiments in which particular subject matter is excluded, in full or in part, such as substances or materials, method steps and conditions, protocols, procedures, assays or analysis. Thus, even though the disclosure is generally not expressed herein in terms of what the disclosure does not include, aspects that are not expressly included in the disclosure are nevertheless disclosed herein.

[0584] A number of embodiments of the disclosure have been described. Nevertheless, it will be understood that various modifications may be made without departing from the spirit and scope of the disclosure. Accordingly, the following examples are intended to illustrate but not limit the scope of disclosure described in the claims.

### 6. EXAMPLES

[0585] The following is a description of various methods and materials used in the studies, and are put forth so as to provide those of ordinary skill in the art with a complete disclosure and description of how to make and use the present disclosure, and are not intended to limit the scope of what the inventors regard as their disclosure nor are they intended to represent that the experiments below were performed and are all of the experiments that may be performed. It is to be understood that exemplary descriptions written in the present tense were not necessarily performed, but rather that the descriptions can be performed to generate the data and the like associated with the teachings of the present disclosure. Efforts have been made to ensure accuracy with respect to numbers used (e.g., amounts, percentages, etc.), but some experimental errors and deviations should be accounted for.

### 6.1. Example 1: Immunization, Recovery and Screening of pIgR Binders

[0586] To generate a panel of single-domain antibodies that bind to pIgR, llamas were immunized with recombinant human pIgR (hpIgR) and/or mouse pIgR (mpIgR) for about 90 days. The whole blood and PBMCs was isolated from llamas, and RNA was prepared. After first-strand cDNA synthesis, llama-specific primers annealing to (i) the VH (heavy-chain variable region), (ii) VHH leader sequence genes, and (iii) the CH2 gene were used to PCR amplify the VH and VHH gene repertoires.

[0587] VHH repertoires were separated from VH repertoires by running the PCR fragments on a gel and excising the smaller band. The VHH gene repertoire was reamplified and cloned into a CMV-based mammalian vector. The VHH-gene was formatted as Ig-fusion. The library was transformed in E. coli. Single colonies were picked in a 96-well format for Sanger sequencing. Clone Selection was based on sequence uniqueness (weighted heavily on CDR3) and a Framework 2 signature indicative of VHH or Heavy-Chain only derived sequence.

[0588] B-cells that were positive for VHH and antigen binding were isolated and recovered, cloned and the VHH variable domain were sequenced using established protocols. Following VHH-region sequencing, a panel of VHH molecules were expressed and purified as fusions to the human IgG1 mono-Fc protein. The sequence of the human IgG1 mono-Fc protein is as follows:

(SEQ ID NO: 1981)
SPAPELLGG PSVFLFPPKP KDTLMISRTP EVTCVVVDVS
HEDPEVKFNW YVDGVEVHNA KTKPREEQYN STYRVVSVLT
VLHQDWLNGK EYKCKVSNKA LPAPIEKTIS KAKGQPREPQ
VYTKPPSREE MTKNQVSLSC LVKGFYPSDI AVEWESNGQP
ENNYKTTVPV LDSDGSFRLA SYLTVDKSRW QQGNVFSCSV
MHEALHNHYT QKSLSLSP GK

[0589] Initial Library Screening: After each panning round showing enrichment, 94 individual clones were expressed and tested in an off-phage initial screen for specific binding to mpIgR or hpIgR (respectively depending on the antigen used). Screening of monoclones in an off-phage format was performed by transforming the phagemid pool into a non-amber-suppressor strain of E. coli and picking random colonies. The VHH proteins were recovered in the periplasmic fraction by performing osmotic shock. Periplasmic fractions containing His-tagged nanobodies were tested for binding to hpIgR or mpIgR. Bound nanobody was detected with a polyclonal anti-alpaca VHH domain antibody. Each clone was also tested for non-specific binding to BSA in parallel. The ELISA values obtained on BSA were subtracted from the ELISA values obtained on the respective pIgR antigen.

[0590] Repeat Testing of Positive Hits: The hits identified in the initial screen of the phage pools were re-tested for binding to either hpIgR or mpIgR. Periplasmic fractions were prepared again by performing osmotic shock. Periplasmic fractions containing His-tagged nanobodies were tested for binding to mpIgR. In this assay, bound nanobody was detected with an anti-VHH antibody. Each clone was also tested for non-specific binding to BSA in parallel. The ELISA values obtained on BSA were subtracted from the ELISA values obtained on the respective pIgR antigen. Representative results for binding to hpIgR by ELISAs are provided in Table 2.

TABLE 2
Representative results for binding to hpIgR by ELISAs

| CloneID | ELISA (OD) |
|---|---|
| 01A01R3 | 0.91 |
| 01A02R3 | 1.98 |
| 01A03R3L | 2.03 |
| 01A04R3LS | 2.15 |
| 01A06R3LS | 1.95 |
| 01A07R3 | 1.68 |
| 01A07R3LS | 0.48 |
| 01A09R2 | 1.86 |
| 01A09R3L | 1.98 |
| 01A09R3LS | 1.89 |
| 01B01R3 | 1.68 |
| 01B02R2L | 1.94 |
| 01B03R2LS | 2.18 |
| 01B04R2 | 2.16 |
| 01B04R3L | 2.12 |
| 01B05R2 | 2.07 |
| 01B06R2LS | 1.9 |
| 01B07R2L | 0.67 |
| 01B07R3L | 2.29 |
| 01B08R2 | 1.94 |
| 01B10R3L | 2.04 |
| 01B10R3LS | 1.91 |
| 01B11R3LS | 2.35 |
| 01B12R2 | 1.78 |
| 01B12R3LS | 2.17 |
| 01C01R2L | 1.97 |
| 01C01R2LS | 0.82 |
| 01C02R2 | 2.26 |
| 01C02R3 | 1.8 |
| 01C02R3LS | 2.01 |
| 01C03R2L | 2.37 |
| 01C03R3 | 0.56 |
| 01C03R3L | 1.77 |
| 01C03R3LS | 2.11 |
| 01C04R3 | 2.33 |
| 01C05R3LS | 1.89 |
| 01C08R2L | 1.98 |
| 01C09R3 | 1.29 |
| 01C09R3LS | 1.64 |
| 01C11R2 | 1.3 |
| 01C12R2 | 1.85 |
| 01D01R3 | 1.95 |
| 01D02R3LS | 2.45 |
| 01D04R3LS | 2.06 |
| 01D05R2LS | 2.41 |
| 01D06R2 | 0.5 |
| 01D07R3LS | 2.07 |
| 01D08R3 | 2.11 |
| 01D09R3 | 0.55 |
| 01E01R3 | 0.4 |
| 01E01R3LS | 2.2 |
| 01E02R3LS | 1.69 |
| 01E03R2 | 2.13 |
| 01E03R3 | 1.07 |
| 01E04R3LS | 2.13 |
| 01E05R2 | 2.1 |
| 01E09R3LS | 1.97 |
| 01E10R2 | 0.48 |
| 01E10R3 | 1.96 |
| 01E11R2 | 2.01 |
| 01F01R2 | 2.2 |
| 01F03R2 | 2.1 |
| 01F03R2LS | 2.14 |
| 01F03R3LS | 2.35 |
| 01F04R2LS | 2.09 |
| 01F04R3 | 1.83 |
| 01F04R3LS | 1.98 |
| 01F05R2LS | 2.4 |
| 01F08R3LS | 2.1 |
| 01F09R3 | 1.85 |
| 01F11R2 | 0.62 |
| 01F12R2 | 2.12 |
| 01G02R2LS | 1.62 |
| 01G03R3L | 0.74 |
| 01G04R3 | 0.73 |
| 01G05R2LS | 2.15 |
| 01G07R2L | 1.54 |
| 01G07R3 | 2.19 |
| 01G08R3LS | 2.41 |
| 01G09R2 | 2 |
| 01G09R3LS | 1.9 |
| 01G10R3LS | 1.96 |
| 01H01R2LS | 1.17 |
| 01H02R3LS | 1.97 |
| 01H03R2L | 2.18 |
| 01H04R3 | 2.38 |
| 01H05R3 | 1.27 |
| 01H06R3L | 1.87 |
| 01H08R3 | 1.11 |
| 01H10R2 | 1.83 |
| 01H10R3 | 1.54 |
| 01H11R2LS | 0.43 |
| 01H11R3LS | 0.99 |
| 02B03R3 | 0.44 |
| 02B09R3 | 1.13 |
| 02B11R3 | 1.35 |
| 02B12R3 | 2.38 |
| 02C10R3 | 2.05 |
| 02D06R3 | 2.16 |
| 02D07R3 | 1.35 |
| 02E01R3LS | 1.54 |
| 02F10R3 | 2.05 |
| 02G03R3 | 2 |
| 02G04R3 | 0.93 |
| 02G06R3 | 1.8 |
| 02H04R3 | 2.4 |
| 02H11R3 | 1.97 |
| 03A08R3 | 2.1 |
| 03B07R3 | 2.19 |
| 03C05R3 | 0.99 |
| 03C10R3 | 1.77 |
| 03D01R3 | 1.84 |
| 03D02R3 | 2.07 |
| 03D05R3 | 2.29 |
| 03D09R3 | 1.82 |
| 03D12R3 | 2.27 |
| 03F01R3 | 1.97 |
| 03G05R3 | 1.92 |
| 03G07R3 | 1.92 |
| 03H01R3 | 2.07 |
| 03H04R3 | 2 |
| 03H05R3 | 0.46 |

[0591] Bio-layer Interferometry is performed as follows. The ForteBioOctet RED384 system (Pall Corporation) is used to measure binding kinetics between VHH-mono-Fc molecules and pIgR proteins, and between IgA and pIgR proteins (in the absence and presence of VHH-mono-Fc molecules). Data are collected with Octet Data Acquisition version 7.1.0.87 (ForteBio) and analyzed using Octet Data Analysis version 7.1 (ForteBio). To measure binding kinetics between VHH-mono-Fc molecules and HIS-tagged pIgR proteins, VHH-mono-Fc is immobilized on amine-reactive generation-2 (ARG2) biosensors according to manufacturer's instructions and increasing concentrations of pIgR proteins are exposed to sensor-immobilized VHH. In some cases, HIS-tagged pIgR proteins are immobilized on anti-HIS biosensors and exposed to increasing concentrations of VHH-mono-Fc molecules. Association and dissociation rates are measured by the shift in wavelength (nm). For each sensor-immobilized protein, at least three different ligand concentrations are used, and K_{D} (equilibrium dissociation constant) is obtained by fitting the data to 1:1 binding model. All reactions are performed at 25° C. in PBS.

[0592] To measure binding kinetics between IgA and pIgR proteins, IgA is immobilized on ARG2 biosensors according to manufacturer's instructions, and immobilized IgA is exposed to increasing concentrations of pIgR ECD. To test the effect of VHH on pIgR-IgA binding, K_{D} values are measured for pIgR ECD binding to IgA in presence of VHH. IgA immobilized on ARG2 biosensors is exposed to increasing concentrations of pIgR-VHH complex, and association and dissociation rates are measured by the shift in wavelength (nm). For each sensor-immobilized IgA, at least three different pIgR or pIgR-VHH concentrations are used, and K_{D} (equilibrium dissociation constant) is obtained by fitting the data to 2:1 binding model. All reactions are performed at 25 C in PBS.

[0593] Expression and purification of VHH in CHO cells is performed as follows. DNA constructs for VHH are sub-cloned into mammalian expression vectors using the In-Fusion® HD Cloning Kit. ExpiCHO™ cells are transfected with the appropriate expression vectors. Supernatants are harvested after 6-7 days by centrifugation (4,000 g, 15 min), passed through a 0.45-um filter, and purified at 4° C. by MabSelect™ SuRe™ chromatography on an AKTA express system (both GE Healthcare) using DPBS (Sigma) as running buffer and 0.1 M sodium acetate, pH 3.5 as elution buffer. Elutions were immediately neutralized using 25% (v/v) 2 M Tris-HCl pH 7.0, dialyzed to DPBS, sterilized by 0.22-um filtration and stored at 4° C. Concentrations are determined by absorbance at 280 nm on a Nanodrop ND-1000 spectrophotometer (ThermoFisher Scientific).

[0594] Cloning, expression and purification of pIgR constructs in HEK293 cells is performed as follows. Gene blocks-encoding desired hpIgR domain sequences are obtained from IDT and sub-cloned into mammalian expression vectors using the In-Fusion® HD Cloning Kit. HEK Expi293™ cells are transfected with pIgR-domain expression vectors using ExpiFectamine™ 293 transfection kit. Supernatants are harvested after 6-7 days by centrifugation (4,000 g, 15 min), passed through a 0.45-um filter and purified by immobilized metal ion chromatography using HisPur™ Cobalt resin (Thermo scientific). Buffer NPI-20 (Teknova) is used as running buffer and Buffer NPI-300 (Teknova) containing 300 mM Imidazole was used as elution buffer. Elutions are buffer exchanged to DPBS using PD10 desalting columns (GE health care) following manufacturer's instructions and purified pIgR domains are stored at 4° C. Concentrations are determined by absorbance at 280 nm on a Nanodrop ND-1000 spectrophotometer (ThermoFisher Scientific).

[0595] Analytical-SEC is performed as follows. All purified VHH-mono-Fc molecules are analyzed by analytical high-pressure liquid chromatography on an Agilent 1200 infinity system using an Agilent AdvanceBio Size exclusion column (300 Å, 2.7 um, 4.6×150 mm). Column is equilibrated with 0.2M sodium phosphate pH 6.8 and 20 ul of samples are injected at a concentration of 0.5 mg/ml and at a flow rate of 0.35 mL/min. Monomeric VHH-mono-Fc elutes are detected at the expected retention time of ˜4 min at these settings. Data analysis is performed in OpenLab Chemstation to calculate % monomer content.

[0596] SEC-MALS is performed as follows. The molecular weight for purified VHH-mono-Fc molecules is measured by size-exclusion chromatography combined with multi-angle light scattering. The experiment is performed on a Waters high-pressure liquid chromatography instrument connected in series to Wyatt uDAWN light scattering/uTrEX instrument. An Acquity UPLC Protein BEH size-exclusion column (200 Å, 1.7 μm, 4.6×150 mm) is equilibrated with 1×DPBS pH 7.4 and 10 ul of samples are injected at a concentration of 0.5 mg/ml and at a flow rate of 0.3 mL/min. Molecular weight of the primary species (monomeric VHH-Fc) is calculated using the Astra software package (Wyatt).

### 6.2. Example 2: Biophysical Characterization of hpIgR-Specific Binders

[0597] Exemplary pIgR binders from Example 1 are selected for further biophysical and functional assays. The pIgR binders are expressed and purified from CHO cells using Protein-A affinity chromatography. Size-exclusion chromatography combined with multi-angle light scattering is used to show the molecular weight of VHH-mono-Fc binders.

[0598] Thermal stability of a sample is determined by differential scanning fluorimetry, specifically the NanoDSF method, using an automated Prometheus instrument. Measurements are made by loading a sample into a 24-well capillary from a 384-well sample plate. Duplicate runs are performed for each sample. A Prometheus NanoDSF user interface (Melting Scan tab) is used to set up the experimental parameters for the run. The thermal scans for a typical IgG sample spanned from 20° C. to 95° C. at a rate of 1.0° C./minute. Dual-UV technology monitoring of intrinsic tryptophan and tyrosine fluorescence at the emission wavelengths of 330 nm and 350 nm is undertaken. The F350 nm/F330 nm ratio is plotted against temperature to generate an unfolding curve.

[0599] The back reflection optics of the instrument is also used for the detection of sample aggregation. Such optics emitted near-UV light at a wavelength that is not absorbed by proteins. This light passed through the sample and is reflected to the detector. Protein aggregates scatter this light, and thus only non-scattered light reaches the detector. The reduction in back reflected light is a direct measure for aggregation in the sample and is plotted as mAU (Attenuation Units) against temperature. Nano DSF is used for measuring thermal unfolding parameters (Tm and Tagg) of VHH binders at 0.5 mg/mL concentration in Phosphate Buffered Saline, pH 7.4.

[0600] VHH-mono-Fc molecules are expressed in CHO cells and purified using Protein-A affinity chromatography. Homogeneity and molecular weight of the purified proteins are verified by analytical size-exclusion chromatography (A-SEC) and size-exclusion chromatography combined with multiple-angle light scattering (SEC-MALS), respectively.

[0601] Thermal stability is assessed by differential scanning fluorimetry (DSF). K_{D} values for VHH-hpIgR ectodomain interactions are measured by bio-layer interferometry. EC₅₀ values for VHH molecules binding to MDCK-hpIgR cells are measured by flow cytometry.

[0602] Flow Cytometry is performed as follows. To test whether VHH-mono-Fc molecules recognize cell-surface hpIgR, Madin-Darby canine kidney (MDCK) cells engineered to express full-length hpIgR are used. Cells are cultured in Dulbecco's modified Eagle's medium containing 10% fetal calf serum at 37° C. with 5% CO₂. Cells are split into equal fractions (≈70,000 cells) and incubated with increasing concentrations of VHH-mono-Fe molecules for 30 min at 4 C. Cells are washed twice with cold PBS (pH 7.4) and incubated with a fluorescently-labelled anti-Fc antibody (Alexa Fluor® 647 AffiniPure F(ab′)₂ fragment Goat Anti-Human IgG Fcγ Fragment Specific) for 30 min in staining buffer (2 μg/ml Ab) at 4 C. Cells are washed twice with cold staining buffer, resuspended in running buffer and analyzed with an iQue Screener (IntelliCyt Corporation). Binding is assessed by RL1 (A647) Geomeans from the live cell population and EC50 is calculated by fitting log VHH concentration versus MFI in Prism (Graphpad).

### 6.3. Example 3: Cell Binding and Transcytosis Assay

[0603] A transcytosis assay is performed as follows. Madin-Darby canine kidney (MDCK) cells, a commonly used epithelia model system, are used to investigate if VHH binders could be transported across epithelia by pIgR mediated transcytosis. MDCK cells, un-transfected or stably transfected with human pIgR are used to study transcytosis (See Natvig, I. B., Johansen, F. E., Nordeng, T. W., Haraldsen, G. & Brandtzaeg, P. Mechanism for enhanced external transfer of dimeric IgA over pentameric IgM: studies of diffusion, binding to the human polymeric Ig receptor, and epithelial transcytosis. J. Immunol. 159, 4330-4340 (1997)). Expression of hpIgR in MDCK cells and monolayer formation are confirmed by confocal laser microscopy. Approximately 5.0×10⁵ cells are seeded on 1-cm², 3.0-μm collagen-coated PTFE filters (Transwell-COL 3494; Costar). The cells are incubated for 3 days at 37° C. with 5% CO₂ in Dulbecco's modified Eagle's medium containing 10% fetal calf serum, 50 μg/ml gentamicin, and 1 mM L-glutamine. 20 μg of test VHH-mono-Fc molecules are added to the basolateral chamber, and the filters are incubated for 24 or 48 hours at 37° C. in fresh medium. A VHH-mono-Fc that does not bind to pIgR (irrelevant VHH) is used as a control together with 100 nM human IgG (to control for unspecific transport and leakage). The apical medium is harvested, and the amount of VHHmono-Fc, transported by pIgR, is calculated by standard titration studies. IgG leakage to the apical medium is detected by MSD. Additionally, a biotinylated anti-VHH antibody is used to capture VHH-mono-Fc on streptavidin plates and a ruthenylated anti-Fc antibody to detect VHH-mono-Fc by the MSD platform.

### 6.4. Example 4: Transcytosis Assays Using Primary Human Lung Tissue Model

[0604] The EpiAirway human lung tissue model is also used to test the transcytosis activity of 10 VHH molecules from the basolateral to the apical epithelium and their delivery to the mucosal lumen. The EpiAirway model is depicted in FIG. 5. The EpiAirway model is an established lung tissue model engineered from primary human tracheal bronchial cells. Tissue models are obtained from Mattek Corporation and maintained according to manufacturer's instructions. 20 μg of test and control VHH-mono-Fc molecules are added to 1 ml of EpiAirway media in the basolateral chamber and 100 ul of samples are collected from the basolateral and apical chambers at 0, 24 and 48 hours. EpiAirway TEER buffer is used to collect the mucus from the apical chambers. The amount of VHH-mono-Fc present in basolateral media and apical mucus is quantified by electrochemiluminescence method. In this method, streptavidin MSD plates are coated with a biotinylated anti-VHH antibody (2 Vg/ml in PBS) for 1 hour at RT with 1000 rpm, washed 3× with PBT, incubated with blocking buffer for 1 hour at RT, incubated with VHH-mono-Fc containing media/mucus (at different dilutions) for 2 hours at RT with 1000 rpm, washed 3× with PBT, incubated with ruthenylated-anti-human-Fc antibody (2 μg/ml in PBS) for 1 hour at RT with 1000 rpm, washed 3× with PBT and read plates in 40 ul reading buffer using the MSD imager. The amount of VHH-mono-Fc in basolateral and apical chambers is calculated by plotting ECLU values against VHH-mono-Fc standard curves in Prism (Graphpad). A similar experiment in which IgG and IgA are transcytosed is conducted.

[0605] The amount of VHH present in the apical mucus 0, 24 and 48 hours post treatment is quantified by the electrochemiluminescence.

[0606] The Electrochemiluminescence assay is performed as follows. A meso-scale discovery (MSD) platform is used for conducting epitope mapping and epitope burial studies. To test the binding of VHH-mono-Fc molecules to purified pIgR protein constructs, Streptavidin MSD plates are coated with a biotinylated anti-HIS antibody (2 μg/ml in PBS) for 1 hour at RT with 1000 rpm, washed 3× with PBT (PBS+0.1% Tween-20), incubated with blocking buffer for 1 hour at RT, incubated with His-tagged pIgR proteins (10 μg/ml in PBS) for 2 hours at RT with 1000 rpm, washed 3× with PBT, incubated with VHH-mono-Fc molecules (100 μg/ml in PBS) for 2 hours at RT with 1000 rpm, washed 3× with PBT, incubated with ruthenylated-anti-human-Fc antibody (2 μg/ml in PBS) for 1 hour at RT with 1000 rpm, washed 3× with PBT and read plates in 40 ul reading buffer using the MSD imager. ECLU values are plotted as a heatmap.

[0607] To check whether VHH recognizes a buried epitope on pIgR, EC₅₀ values are measured for VHH-mono-Fc molecules binding to hpIgR-ECD protein by electrochemiluminescence using two different detection antibodies, an anti-Fc antibody and an anti-VHH antibody. pIgR ECD (10 μg/ml in PBS) is coated on high-bind MSD plates for 2 hours at RT with 1000 rpm, incubated with blocking buffer for 1 hour at RT, incubated with VHH-mono-Fc molecules (increasing concentrations in PBS) for 2 hours at RT with 1000 rpm, washed 3× with PBT, incubated with ruthenylated secondary antibody (2 Vg/ml in PBS) for 1 hour at RT with 1000 rpm, washed 3× with PBT and read plates in 40 ul reading buffer using the MSD imager. EC50 is calculated by fitting log VHH concentration versus log ECLU in Prism (Graphpad). The increase in EC₅₀ (>50-fold) due to anti-VHH detection is used as a measure to determine whether VHH recognized buried epitope on pIgR.

[0608] At 48 hours post-treatment, tissue samples are fixed, permeabilized and stained for tracking hpIgR and VHH across the EpiAirway model. FIG. 6 shows that the EpiAirway tissue model is on a slanted membrane, which is not ideal for image analysis. FIG. 7 illustrates a strategy for Opera Phenix imaging and analysis to overcome slanted tissue issues with EpiAirway tissue model.

[0609] Following transcytosis, indirect immunofluorescence is used to trace the location and amount of hpIgR and VHH across the EpiAirway tissue model by Opera Phenix confocal laser microscopy. Indirect immunofluorescence is used to track the amount of pIgR and VHH-mono-Fc retained across the EpiAirway model two-days post-treatment. Tissue samples are rinsed in PBS, tissues are fixed with 2 ml of 10% Formalin at RT for 20 minutes, washed three times with 2 ml PBST (1% Triton-X100 in PBS) at RT for 10 minutes each (with gentle agitation), incubated with primary antibodies (500 ul apical, 500 ul basolateral) diluted in PBTG (PBST with 10% goat serum) for 2 hours at RT (with gentle agitation), washed two times with 2 ml PBTG at RT for 10 minutes each (with gentle agitation), incubated with secondary antibodies (100 ul apical, 100 ul basolateral) diluted in PBTG for 1 hour at RT (with gentle agitation) and washed two times with 2 ml PBTG at RT for 10 minutes each (with gentle agitation). The primary antibody mix contains mouse antibody and biotinylated anti IgA antibody both at 5 μg/ml. The secondary antibody mix contains Alexa-Flour 488-labelled anti-mouse antibody (1:100 dilution), Alexa-Flour 647-labelled streptavidin (1:100 dilution) and Hoechst (1:1000 dilution). Fixed, permeabilized and stained tissues are imaged at 20× resolution (30-40 planes, 2 um distance) using Opera Phenix confocal laser microscopy. Image analysis is performed using the Harmony suite, fluorescence readouts were corrected for membrane auto-fluorescence, normalized for number of cells and plotted as heat maps in Prism (Graphpad).

### 6.5. Example 5: Domain-Level Epitope Mapping

[0610] To conduct domain-level epitope mapping of VHHs, HIS-tagged hpIgR constructs (D1, D2, D3, D5, D1-D2, D2-D3 and D4-D5) are expressed and purified each encoding one or two domains of hpIgR ECD from HEK293 cells using immobilized metal ion affinity chromatography. Binding of VHH-mFc molecules are tested to immobilized pIgR constructs by the electrochemiluminescence method.

[0611] Recognition of buried epitopes by pIgR binders is performed as follows. The EC₅₀ for VHH-mono-Fc molecules binding to hpIgR-ECD protein is measured by electrochemiluminescence using two different detection antibodies, an anti-Fc antibody and an anti-VHH antibody. The increase in EC₅₀ (>50-fold) due to anti-VHH detection is used as a measure to determine whether VHH recognized buried epitope on pIgR.

[0612] To test whether the VHH binding region recognizes buried epitopes on hpIgR, an electrochemiluminescence method using two different detection antibodies, an anti-Fc antibody and an anti-VHH antibody are used to generate EC₅₀ values that reflect VHH-mono-Fc molecules binding to hpIgR-ECD protein. An increase in EC₅₀ (>50-fold) due to anti-VHH detection is used as a measure to determine whether VHH recognized buried epitope on pIgR.

[0613] To conduct domain-level epitope mapping, seven HIS-tagged pIgR ectodomain constructs (D1, D2, D3, D5, D1-D2, D2-D3 and D4-D5) are expressed and purified from HEK293 cells using immobilized metal ion affinity chromatography.

[0614] Additionally, solution x-ray scattering studies conducted by Bonner et al., Mucosal Immunol., 2:74-84 (2009) suggest that upon interaction with dIgA, pIgR takes on an extended conformation, with domain-1 interacting with the Cα2 domain of one Fcα subunit and domain-5 binding the Cα2 subunit on the same side of the opposite Fcα subunit (FIG. 11B).

[0615] Next, competition binding assays are conducted for exemplary VHH-mono-Fc molecules that displayed KD values of <100 nM for binding to hpIgR. First, to test the influence of IgA on hpIgR-VHH binding, KD values are measured for full-length hpIgR ECD binding to immobilized VHH-mono-Fc molecules in the absence and presence of dIgA2 by bio-layer interferometry. Second, to test the effect of VHH on dIgA2 binding to hpIgR, K_{D} values for a recombinant dimeric IgA2 construct binding to the hpIgR ectodomain are measured with and without the presence of VHH-mono-Fc molecules.

### 6.6. Example 6: VHH/IgA Competition Studies (Binding and Transcytosis)

[0616] To test the importance of hpIgR domain-1 CDRs, each domain-1 CDR of human pIgR is swapped with the respective domain-1 CDR of teleost fish pIgR to make three new CDR-swapped hpIgR domain-1 constructs for use in binding studies. (Full-length hpIgR ECD was purchased from R&D Systems.) The five constructs (D1-D2, D1, D1_tCDR1, D1_tCDR2, D1_tCDR3) are expressed and purified from HEK293 cells using immobilized metal ion affinity chromatography. Three hpIgR domain-1 CDR mutants (D1_tCDR1, D1_tCDR2, D1_tCDR3) contain respective teleost fish CDR on a hpIgR domain-1 framework. His-tagged pIgR constructs are immobilized on anti-HIS biosensors and binding of VHH-mono-Fc molecules to pIgR constructs are measured by bio-layer interferometry.

[0617] The above examples show the generation, screening and characterization of hpIgR-binding VHH molecules by biophysical and functional assays.

### 6.7. Example 7: Additional Transcytosis Assays

[0618] MDCK cells expressing hpIgR as described in Example 3, are a relevant epithelia model system and are used to assay forward and reverse transcytosis activities of VHH-mono-Fc molecules.

[0619] MDCK cells expressing hpIgR are cultured in DMEM containing 10% FBS at 37° C. with 5% C02. To prepare monolayers of such cells (MDCK-hpIgR monolayers), 5×10⁵ cells were seeded on fibronectin- and collagen-treated Transwell™ permeable supports (Costar) containing 0.4 μm polyester membrane filter. The cells are then incubated for 3 days, serum starved for 2 hours and supplemented with DMEM containing 1% FBS (assay media). Basolateral and apical chambers contain 1.5 ml and 0.5 ml of assay media, respectively.

[0620] To test the forward transcytosis activity of VHH-mono-Fc molecules across the MDCK-hpIgR monolayers, 20 μg of test or control VHH-mono-Fc molecules are added to the basolateral chamber and 100 μl of media is collected from the basolateral and apical chambers at different time points following the addition of VHH-mono-Fc molecules (0, 4, 8, 12, 24, 36 and 48 hours).

[0621] To test the reverse transcytosis activity of VHH-mono-Fc molecules across the MDCK-hpIgR monolayers, 20 μg of test or control VHH-mono-Fc molecules are added to the apical chamber and 100 μl of media is collected from the basolateral and apical chambers at different time points following the addition of VHH-mono-Fc (0, 4, 8, 12, 24, 36 and 48 hours).

[0622] The amount of VHH-mono-Fc present in basolateral and apical media is quantified by electrochemiluminescence method. Streptavidin MSD plates are coated with a biotinylated anti-VHH antibody (2 μg/ml in PBS) for 1 hour at RT with 1000 rpm, washed 3× with PBT, incubated with blocking buffer for 1 hour at RT, incubated with VHH-mono-Fc containing media/mucus (at different dilutions) for 1 hour at RT with 1000 rpm, washed 3× with PBT, incubated with ruthenylated-anti-human-Fc antibody (2 μg/ml in PBS) for 1 hour at RT with 1000 rpm, washed 3× with PBT and read plates in 40 μl reading buffer using the MSD imager. The amount of VHH in basolateral and apical chambers are calculated by plotting ECLU values against VHH-mono-Fc standard curves in Prism (Graphpad).

[0623] The teachings of all patents, published applications and references cited herein are incorporated by reference in their entirety.

[0624] While example embodiments have been particularly shown and described, it will be understood by those skilled in the art that various changes in form and details may be made therein without departing from the scope of the embodiments encompassed by the appended claims.

[0625] From the foregoing, it will be appreciated that, although specific embodiments have been described herein for the purpose of illustration, various modifications may be made without deviating from the spirit and scope of what is provided herein. All of the references referred to above are incorporated herein by reference in their entireties.

### 6.8. Example 8: Binding Affinity Between pIgR and VHH Measured by Surface Plasmon Resonance (SPR)

[0626] The example demonstrated the measurement of binding affinity between pIgR and VHH, i.e., a VHH Mono-Fc antibody. To characterize the binding ability of VHHs, the affinity between VHH and recombinant pIgR extracellular domain from human, mouse, rat and cynomolgus monkey was determined by SPR, respectively. Furthermore, five immunoglobulin (Ig) biding domains, D1 to D5, from human pIgR were generated to determine the VHH specific binding region on human pIgR. The binding affinity and kinetics of VHH with five Ig domains were also measured by SPR. The binding epitope was deemed specific when a VHH bound to one domain without cross-reaction with the other domains. The human pIgR binders were then divided into different categories based on which domain they bound.

[0627] The binding of VHH to the extracellular domains of pIgR was measured by BIAcore 8K SPR (GE). In a single-cycle kinetics method, the VHHs were captured on a surface coated with high density of anti-human Fc proteins, followed by injecting the analyte, which was the recombinant pIgR domain here, at a series of concentrations. Then the response was measured in resonance units (RU), which was proportional to the mass on the surface.

[0628] In an assay, two flow cells of the SPR were used, in which the flow cell 1 ran the buffer reference, and the flow cell 2 ran the analyte. First, goat anti-human Fc IgG antibodies at 30 μg/mL (Jackson Immuno research, Cat #109-005-098) were immobilized on a CM5 Sensor Chip (GE) by amine coupling in 10 mM acetate buffer, pH 4.5 through both flow cells 1 and 2. The HBSP (GE) buffer was followed at a flow rate of 30 μL/min. Then, the VHHs were captured on the anti-human Fc protein surface at 0.5 ug/ml (˜200-300 RU) on the flow cell 2. The running buffer was changed to HBSP with 100 ug/ml BSA after the capture. Next, the pIgR extracellular domains were used as analyte and loaded in a series of concentrations, starting at 30 nM with further 3-fold dilution series.

[0629] The extracellular domains were prepared as follows: cynomolgus monkey and rat extracellular domains were produced and characterized in house; mouse and human pIgR extracellular domains were purchased from R&D Systems (Cat #2800-PG-050 & 2717-PG-050 respectively). The pIgR extracellular domains were injected from low to high concentration using a single-cycle kinetics method. The off-rate was monitored at 30 minutes after the last or highest concentration injection. The reference run was completed under the same conditions except that the pIgR injection was replaced by buffer injection.

[0630] The raw data were processed by subtracting two sets of reference data from the response data: (1) reference flow cell 1 subtracted from sample flow cell 2; and (2) buffer blank run subtracted from experimental run. The processed data at all concentrations for each VHH were globally fit to a 1:1 simple Langmuir binding model to extract estimates of the kinetic constants (kₒₙ, k_{off}) and affinity constants (K_{D}). The kinetics and affinity measurement between pIgR and VHH was provided in Table 3.

TABLE 3
Kinetics and affinity measurement between pIgR and VHH

| | SEQ | | | K_{D} (pM) | | Human pIgR |
|---|---|---|---|---|---|---|
| | ID | K_{D} (pM) | K_{D} (pM) | Cynomolgus | K_{D} (pM) | Domain Specificity |
| Name | NO. | Human | Mouse | monkey | Rat | D1-5 |
| 01C08R2L | 1 | 9439 | 5670 | 4137 | 3015 | 1 |
| 01H04R3 | 2 | 114606 | 101410 | 118449 | 88213 | N.B. |
| 01C09R3LS | 3 | 6924 | | 93728 | | 5 |
| 01B05R2 | 4 | 3554 | | 176537 | | 5 |
| 01H08R3 | 5 | 60995 | 3950 | 44337 | 6189 | 1 |
| 01F04R3 | 6 | 5915 | | 30903 | | 5 |
| 02G03R3 | 7 | 1480 | | 3992 | | 4 |
| 01E11R2 | 8 | | 20577 | 86122 | 22454 | N.B. |
| 01E10R2 | 9 | 155074 | 61795 | 228094 | 96856 | N.B. |
| 01E10R3 | 10 | 1391 | | 23220 | | 4 |
| 01B10R3LS | 11 | 38024 | | 191999 | | 5 |
| 01C01R2L | 12 | | 6549 | | | N.B. |
| 01H01R2LS | 13 | 6907 | 12804 | 122683 | 18074 | 1 |
| 01C02R2 | 14 | 275 | | | | 4 |
| 01A09R3L | 15 | 681 | 301 | 353 | 234 | 1 |
| 01F11R2 | 16 | | | | | N.D |
| 01E01R3 | 17 | | | | | N.D |
| 03D05R3 | 18 | 2143 | | 4590 | | 4 |
| 01H11R2LS | 19 | 4066 | 2674 | 2313 | 1458 | 1 |
| 01F04R2LS | 20 | 35750 | 9027 | 27968 | 8902 | 1 |
| 03D09R3 | 21 | 72 | | 4 | | 4 |
| 03H01R3 | 22 | 150 | | | | 4 |
| 01B12R2 | 23 | 4480 | 107068 | 6538 | 18219 | 1 |
| 01F01R2 | 24 | 2126 | | 4081 | | 4 |
| 01F03R2 | 25 | 1363 | | 3570 | | 4 |
| 02G06R3 | 26 | | 32281 | | 73536 | N.B. |
| 01G09R2 | 27 | 6579 | | 105786 | | 5 |
| 01D01R3 | 28 | 5961 | | 375482 | | 1 |
| 01D02R3LS | 29 | 809 | | 885 | | 5 |
| 03A08R3 | 30 | 1968 | | | | 4 |
| 02G04R3 | 31 | 1295 | | | | 4 |
| 01C04R3 | 32 | 3088 | | 46316 | | 5 |
| 01G02R2LS | 33 | | 23294 | | | N.B. |
| 01C02R3LS | 34 | 8615 | 4964 | 3089 | 2770 | 1 |
| 01C05R3LS | 35 | 5769 | | 84877 | | 5 |
| 03D01R3 | 36 | 2264 | | 5512 | | 5 |
| 02B12R3 | 37 | 16578 | 4320 | 31518 | 3443 | 1 |
| 01G07R3 | 38 | 1180 | | 40797 | | 5 |
| 01B08R2 | 39 | 1048 | 585572 | 219202 | 115823 | 1 |
| 01C02R3 | 40 | 1230 | | 8434 | | 4 |
| 02B09R3 | 41 | 2465 | | 9514 | | 5 |
| 03H05R3 | 42 | 2930 | | 108212 | | 5 |
| 01F08R3LS | 43 | | | | | N.D |
| 02D06R3 | 44 | | 1342 | | 448 | N.B. |
| 01B11R3LS | 45 | 120002 | 12751 | 334293 | 19862 | N.B. |
| 01G09R3LS | 46 | 5771 | 5706 | 10004 | 4274 | 1 |
| 01D09R3 | 47 | 2760 | | | | 4 |
| 01F03R3LS | 48 | 10878 | | | | 5 |
| 02C10R3 | 49 | 2089 | | | | 2 |
| 01E03R3 | 50 | 2946 | 10394 | 6137 | 24929 | 1 |
| 01C01R2LS | 51 | | 11325 | | | N.B. |
| 03G05R3 | 52 | 3699 | | 30111 | | 5 |
| 01B04R3L | 53 | 13809 | 9198 | 5943 | 4712 | 1 |
| 02H11R3 | 54 | | 710 | | 1736 | N.B. |
| 01C12R2 | 55 | 21412 | 4764 | 22969 | 14092 | 1 |
| 01C11R2 | 56 | | | | | N.D |
| 01E02R3LS | 57 | 600 | | 18 | | 3 |
| 02E01R3LS | 58 | 5321 | 2771 | 5048 | 1636 | 1 |
| 01H05R3 | 59 | 7536 | | 406239 | | 5 |
| 03C05R3 | 60 | 94 | 9017 | 16503 | 1831 | 1 |
| 01A09R3LS | 61 | 122372 | 35235 | 130034 | 22471 | N.B. |
| 01B10R3L | 62 | 8405 | 3753 | 2188 | 1582 | 1 |
| 01H02R3LS | 63 | 3241 | | 20571 | | 1 |
| 01C03R3L | 64 | | 33110 | | 16012 | N.B. |
| 01D04R3LS | 65 | 1156 | | | | 4 |
| 01B03R2LS | 66 | 118782 | 6326 | 99965 | 10964 | N.B. |
| 03F01R3 | 67 | | | | | N.D |
| 01A04R3LS | 68 | | 3291 | | | N.B. |
| 01F03R2LS | 69 | 26219 | 1574 | 34417 | 8051 | 1 |
| 03G07R3 | 70 | 2628 | 5579 | 361400 | | 5 |
| 01B02R2L | 71 | 20201 | 4474 | 14177 | 13413 | 1 |
| 01E04R3LS | 72 | 5369 | 3757 | 3966 | 1360 | 1 |
| 01F12R2 | 73 | 12486 | 263591 | 3175 | 4201 | 1 |
| 01G07R2L | 74 | 3316 | 948 | 4023 | 1439 | 1 |
| 01F09R3 | 75 | 397 | 985131 | 565711 | 70841 | 1 |
| 01A03R3L | 76 | | 6059 | | 2913 | N.B. |
| 01G03R3L | 77 | | 796 | | 1611 | N.B. |
| 01H11R3LS | 78 | 8418 | | 251848 | | 5 |
| 01F05R2LS | 79 | | 3980 | 2720 | | N.B. |
| 01D05R2LS | 80 | 7899 | 13892 | 115794 | 33325 | 1 |
| 01H03R2L | 81 | | | | | N.D |
| 01B04R2 | 82 | 16801 | | | | 4 |
| 01C09R3 | 83 | 2177 | | 5731 | | 5 |
| 01B12R3LS | 84 | | | | | N.D |
| 01A01R3 | 85 | 1306 | 13967 | 4935 | 1344 | 1 |
| 01G10R3LS | 86 | 18547 | | 287238 | | 5 |
| 01G08R3LS | 87 | 8378 | 5596 | 5421 | 2274 | 1 |
| 01H06R3L | 88 | 5259 | 4557 | 1659 | 897 | 1 |
| 01A07R3LS | 89 | 28643 | 8928 | 10052 | 6848 | 1 |
| 03D12R3 | 90 | 606 | | 905 | | 4 |
| 01A07R3 | 91 | 200 | 1408 | 10658 | 1235 | 1 |
| 02B11R3 | 92 | 858 | | 100565 | | 1 |
| 01B07R3L | 93 | 58665 | 3476 | 137847 | 8512 | 1 |
| 01G05R2LS | 94 | | 19807 | | | N.B. |
| 01H10R3 | 95 | 34001 | 47112 | 94596 | 11426 | 1 |
| 01H10R2 | 96 | 5945 | 3453 | 2922 | 2405 | 1 |
| 01C03R3LS | 97 | 4869 | 800 | 2838 | 3024 | 1 |
| 01C03R3 | 98 | 13306 | 25572 | 22174 | 15204 | 1 |
| 01F04R3LS | 99 | 23834 | | 236308 | | 4 |
| 01E01R3LS | 100 | 14480 | 34480 | | 35220 | 1 |
| 03D02R3 | 101 | 391 | 125508 | 37837 | 125772 | 1 |
| 01A02R3 | 102 | 17874 | 7180 | 4971 | 2777 | 1 |
| 01B06R2LS | 103 | 8464 | 14800 | 110653 | 33226 | 1 |
| 02B03R3 | 104 | | 2764 | | 1319 | N.B. |
| 01B07R2L | 105 | 11387 | 4465 | 2112 | 2330 | 1 |
| 01D07R3LS | 106 | 9784 | | 103493 | | 5 |
| 03B07R3 | 107 | 2334 | | 4256 | | 4 |
| 01A06R3LS | 108 | 28977 | 2258 | 112047 | 9230 | 1 |
| 01D08R3 | 109 | 195 | | 448326 | | 4 |
| 01E03R2 | 110 | 6103 | | 373078 | | 1 |
| 02D07R3 | 111 | | 4383 | | 2371 | N.B. |
| 01E05R2 | 112 | 34206 | 17255 | 36248 | 16069 | 1 |
| 01A09R2 | 113 | 2144 | | 4017 | | 4 |
| 01D06R2 | 114 | 1437 | | 14375 | | 5 |
| 02F10R3 | 115 | | 6146 | | 6447 | N.B. |
| 02H04R3 | 116 | | 46603 | | 25444 | N.B. |
| 01G04R3 | 117 | 6218 | | 398857 | | 1 |
| 01B01R3 | 118 | 1377 | | 3779 | | 4 |
| 03H04R3 | 119 | | | | | N.D |
| 01C03R2L | 120 | | 3665 | | | N.B. |
| 01E09R3LS | 121 | 8393 | | 134721 | | 5 |
| 03C10R3 | 122 | 1665 | | 17502 | | 5 |

N.B.: No binding detected because the VHH was not a human species hIgR binder;
N.D: Low or no binding detected to any species of pIgR.

### 6.9. Example 9: Thermal Stability of VHH Assessed by Differential Scanning Fluorimetry (DSF)

[0631] To characterize the stability of VHH, the thermal stability was assessed by measuring the melting temperature (Tm) using DSF. In addition to affinity and epitope specificity, thermal stability is an important characteristic to determine whether a protein can be utilized as a therapeutic.

[0632] The thermal unfolding of VHH was monitored by DSF, specifically the NanoDSF method, using the Prometheus NT.Plex instrument (NanoTemper Technologies; Munchen, Germany). The sample in PBS pH 7.4 was loaded into Standard Capillaries (NanoTemper Technologies) from a 384-well sample plate. The NIST mAb (and/or CNTO3930, CNTO5825) was included as a control. Duplicate or triplicate runs were performed.

[0633] Thermal unfolding was monitored in a 1° C./min thermal ramp from 20 to 95° C. Thermal melting temperatures were determined automatically by PR. ThermControl Software (NanoTemper Technologies), and further analyzed using the PR. Stability Analysis Software (NanoTemper Technologies). The melting temperature (Tm) of VHH was provided in Table 4.

TABLE 4
Melting temperature (Tm) of VHH

| Name | SEQ ID NO. | Tm |
|---|---|---|
| 01C08R2L | 1 | 54.2 |
| 01H04R3 | 2 | 54.8 |
| 01C09R3LS | 3 | 54.8 |
| 01B05R2 | 4 | 55.0 |
| 01H08R3 | 5 | 55.1 |
| 01F04R3 | 6 | 53.8 |
| 02G03R3 | 7 | 55.0 |
| 01E11R2 | 8 | 55.3 |
| 01E10R2 | 9 | 55.1 |
| 01E10R3 | 10 | 54.9 |
| 01B10R3LS | 11 | 54.8 |
| 01C01R2L | 12 | 54.8 |
| 01H01R2LS | 13 | 54.8 |
| 01C02R2 | 14 | 55.3 |
| 01A09R3L | 15 | 55.4 |
| 01F11R2 | 16 | N.A. |
| 01E01R3 | 17 | N.A. |
| 03D05R3 | 18 | 55.1 |
| 01H11R2LS | 19 | 55.4 |
| 01F04R2LS | 20 | 55.3 |
| 03D09R3 | 21 | 53.9 |
| 03H01R3 | 22 | 55.2 |
| 01B12R2 | 23 | 54.9 |
| 01F01R2 | 24 | 55.0 |
| 01F03R2 | 25 | 54.8 |
| 02G06R3 | 26 | 55.0 |
| 01G09R2 | 27 | 54.4 |
| 01D01R3 | 28 | 38.7 |
| 01D02R3LS | 29 | 55.2 |
| 03A08R3 | 30 | 55.3 |
| 02G04R3 | 31 | 55.0 |
| 01C04R3 | 32 | 53.0 |
| 01G02R2LS | 33 | 55.2 |
| 01C02R3LS | 34 | 54.7 |
| 01C05R3LS | 35 | 55.2 |
| 03D01R3 | 36 | 54.9 |
| 02B12R3 | 37 | 54.0 |
| 01G07R3 | 38 | 54.9 |
| 01B08R2 | 39 | 52.6 |
| 01C02R3 | 40 | 55.1 |
| 02B09R3 | 41 | 54.9 |
| 03H05R3 | 42 | 51.6 |
| 01F08R3LS | 43 | N.A. |
| 02D06R3 | 44 | 53.4 |
| 01B11R3LS | 45 | 55.5 |
| 01G09R3LS | 46 | 55.4 |
| 01D09R3 | 47 | 54.4 |
| 01F03R3LS | 48 | 53.8 |
| 02C10R3 | 49 | 54.8 |
| 01E03R3 | 50 | 54.4 |
| 01C01R2LS | 51 | 54.9 |
| 03G05R3 | 52 | 54.7 |
| 01B04R3L | 53 | 54.2 |
| 02H11R3 | 54 | 54.7 |
| 01C12R2 | 55 | 53.0 |
| 01C11R2 | 56 | N.A. |
| 01E02R3LS | 57 | 53.0 |
| 02E01R3LS | 58 | 54.5 |
| 01H05R3 | 59 | 54.9 |
| 03C05R3 | 60 | 55.1 |
| 01A09R3LS | 61 | 51.8 |
| 01B10R3L | 62 | 54.8 |
| 01H02R3LS | 63 | 54.3 |
| 01C03R3L | 64 | 53.8 |
| 01D04R3LS | 65 | 55.3 |
| 01B03R2LS | 66 | 55.2 |
| 03F01R3 | 67 | N.A. |
| 01A04R3LS | 68 | 55.0 |
| 01F03R2LS | 69 | 55.1 |
| 03G07R3 | 70 | 55.2 |
| 01B02R2L | 71 | 52.2 |
| 01E04R3LS | 72 | 54.1 |
| 01F12R2 | 73 | 55.1 |
| 01G07R2L | 74 | 55.5 |
| 01F09R3 | 75 | 54.3 |
| 01A03R3L | 76 | 52.5 |
| 01G03R3L | 77 | 55.2 |
| 01H11R3LS | 78 | 48.3 |
| 01F05R2LS | 79 | 54.7 |
| 01D05R2LS | 80 | 55.4 |
| 01H03R2L | 81 | N.A. |
| 01B04R2 | 82 | 55.2 |
| 01C09R3 | 83 | 55.0 |
| 01B12R3LS | 84 | N.A. |
| 01A01R3 | 85 | 53.9 |
| 01G10R3LS | 86 | 38.6 |
| 01G08R3LS | 87 | 54.4 |
| 01H06R3L | 88 | 53.2 |
| 01A07R3LS | 89 | 54.9 |
| 03D12R3 | 90 | 52.3 |
| 01A07R3 | 91 | 55.2 |
| 02B11R3 | 92 | 55.0 |
| 01B07R3L | 93 | 55.3 |
| 01G05R2LS | 94 | 55.2 |
| 01H10R3 | 95 | 55.0 |
| 01H10R2 | 96 | 54.8 |
| 01C03R3LS | 97 | 55.2 |
| 01C03R3 | 98 | 54.9 |
| 01F04R3LS | 99 | 54.4 |
| 01E01R3LS | 100 | 51.9 |
| 03D02R3 | 101 | 54.1 |
| 01A02R3 | 102 | 55.0 |
| 01B06R2LS | 103 | 55.1 |
| 02B03R3 | 104 | 54.9 |
| 01B07R2L | 105 | 54.5 |
| 01D07R3LS | 106 | 54.9 |
| 03B07R3 | 107 | 55.1 |
| 01A06R3LS | 108 | 55.7 |
| 01D08R3 | 109 | 55.3 |
| 01E03R2 | 110 | 37.0 |
| 02D07R3 | 111 | 53.5 |
| 01E05R2 | 112 | 55.4 |
| 01A09R2 | 113 | 55.1 |
| 01D06R2 | 114 | 54.6 |
| 02F10R3 | 115 | 54.8 |
| 02H04R3 | 116 | 54.2 |
| 01G04R3 | 117 | 36.6 |
| 01B01R3 | 118 | 54.4 |
| 03H04R3 | 119 | N.A. |
| 01C03R2L | 120 | 54.6 |
| 01E09R3LS | 121 | 53.2 |
| 03C10R3 | 122 | 54.7 |

N.A.: Not tested for thermal stability due to lwo or no binding affinity to pIgR detected by SPR.

### 6.10. Example 10: Exemplary Antibodies and Sequences

[0634] Additional details for exemplary antibodies used in certain examples are provided in Tables 5 Å-5C.

TABLE 5A
Sequence Listing Table

| | | SEQ |
|---|---|---|
| | | ID |
| Name | Sequence | NO. |
| 01C08R2L | EVQLVESGGGLVQAGDSLRL | 1 |
| | SCAASGRTFTTYGVGWFRQA | |
| | PGKEREFVTTITWSGSTNYK | |
| | YYADSVKGRFTISRDNAKNT | |
| | VYLQMNSLKPDDTAVYYCAA | |
| | STVLTDPRVPTEYDYWGQGT | |
| | QVTVSS | |
| 01H04R3 | EVQLVESGGGLVQPGGSLRL | 2 |
| | SCAASGRTFSSLTMAWFRRA | |
| | PGKEREFVAAQKWAGATTYT | |
| | YYGDSVKGRFTISRDNAKDT | |
| | VYLQMNSLKPVDTAIYYCAA | |
| | DTSSIVGDPRSPNRYDYWGQ | |
| | GTQVTVSS | |
| 01C09R3LS | EVQLVESGGGLVQAGGSLRL | 3 |
| | SCAASGRTINTYVMGWFRQA | |
| | PGKEREFVARIDWSGSSTDY | |
| | ADSVKGRFTISRDNAKNTVY | |
| | LQMNSLKPEDTAVYYCAGSA | |
| | YYSGYVTHRDFGSWGQGTQV | |
| | TVSS | |
| 01B05R2 | EVQLVESGGGLVQAGGSLRL | 4 |
| | SCAASGRSLSFDTYAMGWFR | |
| | QAPGKEREFVASIDWNGGST | |
| | YYADSVKGRFTISRDNARNT | |
| | VNLRMNSLKPDDTAVYYCAA | |
| | ARYYTSGTYFPANYWGQGTQ | |
| | VTVSS | |
| 01H08R3 | QVQLVESGGGSVQTGGSLRL | 5 |
| | SCTASGRTFSNYGMGWFRQA | |
| | PGKEREFVAGITRSGRTTYY | |
| | YYADAVKGRFTIPRDNADNT | |
| | IYLQMDSMKPDDTAVYYCAA | |
| | RQGENNYDPRSGSAYNYWGP | |
| | GTQVTVSS | |
| 01F04R3 | QVQLVESGGGLVQAGDSLRL | 6 |
| | SCAASGRALSFNTYAMAWFR | |
| | QAPGKEREFVASITYNGGST | |
| | YYADSVRGRFTVTRDSGKNT | |
| | VTLRMNSLKPDDTAVYYCAS | |
| | AQYWRSGTSFPANYWGQGTL | |
| | VTVSS | |
| 02G03R3 | EVQLVESGGGLVQAGGSLRL | 7 |
| | SCAASGMPDNIFSIKTMGWY | |
| | RQAPGKERELVAAITSGGST | |
| | NYGDSVKDRFTISRDRIENT | |
| | VNLEMNNLKPEDTAVYTCHA | |
| | DLTYIRFQDMEYWGKGTQVT | |
| | VSS | |
| 01E11R2 | QVQLVESGGGLVQTGGSLRL | 8 |
| | SCAASGLTFSSYTMGWFRQA | |
| | PGKEREFVAAISWGGASTWY | |
| | ADSVKGRFTISRDNAKTMVY | |
| | LQMNGLKPEDTAVYYCAKGR | |
| | NNGYATAVRAYDYWGQGTLV | |
| | TVSS | |
| 01E10R2 | EVQLVESGGGLVQAGGSLRL | 9 |
| | SCAASGRTLSVDRMGVVFRQ | |
| | VPGKEREFIAARTWSGSSTY | |
| | IYYADSVKGRFAISRDRAKN | |
| | TIDLQMNSLKLEDTGAYYCA | |
| | ADVRGGSYDVRRDEGYAYVV | |
| | GQGTLVTVSS | |
| 01E10R3 | QVQLVESGGGLVQSGGSLRL | 10 |
| | SCAASGRTFSDYAMGWFRQA | |
| | PGKERELVAAITWNGGSTYY | |
| | ADSVKGRFTISRDNAKNTVD | |
| | LQMNSLKPEDTAVYYCAADP | |
| | LNSDSAGTYDYWGQGTLVTV | |
| | SS | |
| 01B10R3LS | QVQLVESGGGLVQAGGSLRL | 11 |
| | SCAASGRTIYGYVMGWFRQA | |
| | PGKEREFVARIDWSGSSTDY | |
| | ADSVKGRFTISRDNAKNTVY | |
| | LQMNSLKPEDTAVYYCAGSA | |
| | YYSGYVTHRDFGSWGQGTQV | |
| | TVSS | |
| 01C01R2L | QVQLVESGGGLVQAGGSLRL | 12 |
| | SCAASGRTLRSYIVGWFRQA | |
| | PGKEREFVAAVTWSDGRRVT | |
| | ADPVKGRFTISRDNAKNTVY | |
| | LQMDSLKPEDAAVYYCAVSR | |
| | GGAYEYSRAYEYWGQGTLVT | |
| | VSS | |
| 01H01R2LS | EVQLVESGGGLVQTGGSLRL | 13 |
| | SCAASGRTFSPYAMGWFRQA | |
| | PGKEREFVAAIRWSGATTYK | |
| | YVGGSVQGRFTISRDAAGNT | |
| | VYLQMNSVKPEDTAVYYCAA | |
| | DRVPKDISIDPRNPKDWDYV | |
| | VGKGTQVTVSS | |
| 01C02R2 | EVQLVESGGGLVQAGGSLRL | 14 |
| | SCAASGRSYAMGWFRQAPGK | |
| | EREFAAAISWSGSRTYYADA | |
| | VKGRFTISRDNAKNTVYLQM | |
| | NSLKPEDTAVYYCAADPDGT | |
| | VVASSGWTNSYEYGYWGQGT | |
| | LVTVSS | |
| 01A09R3L | EVQLVESGGGVVQAEDSLRL | 15 |
| | SCAASGLSFSLSRMGWFRQA | |
| | PGKEREFVATIEWSGRSTYK | |
| | YYDDSVKGRFAVSGDNTKNT | |
| | MNLQMKGLNLEDTGVYYCAA | |
| | NPNNYGDPRTPGAYQYWGQG | |
| | TQVTVSS | |
| 01F11R2 | EVQLVESGGGLVQAGGSLRL | 16 |
| | SCAASGRTLNTYVMGWFRQA | |
| | PGKEREFVARIDWSGSTTDY | |
| | ADSVKGRFTISRDNAKNTVY | |
| | LQMNSLKPEDTAVYYCAGSA | |
| | YYSGYVTHRDFGSWGQGTQV | |
| | TVSS | |
| 01E01R3 | EVQLVESGGGLLQAGGSLRL | 17 |
| | SCAASGRTYAMAWFSQAPGK | |
| | EREFVAGIRGGGGYTYSADS | |
| | VKGRFTISRDNAKNTVHLQM | |
| | NMLKPEDTAVYYCAAGDSSL | |
| | TLGTRAYTAEAYEHWGQGTL | |
| | VTVSS | |
| 03D05R3 | EVQLVESGGGLVQAGGSLRL | 18 |
| | SCAASGRTFSSNPMGWFRQA | |
| | PGKEREFVAAISWSGGGTYY | |
| | ADSVKGRFTISRDNAKNTVT | |
| | LQMNSLKPEDTAVYYCASRD | |
| | YSDPISLWVEGREYDYWGQG | |
| | TLVTVSS | |
| 01H11R2LS | EVQLVESGGGLVQAGDSLRL | 19 |
| | SCAASGRTLTTYGMGWFRQA | |
| | PGKEREFVATIKWSGSTNYK | |
| | YYADSVKGRFTISRDNAKNT | |
| | VYLQMNSLKPEDTAVYYCAA | |
| | GTVLGDPRVLNEYDYVVGQG | |
| | TLVTVSS | |
| 01F04R2LS | EVQLVESGGGLVQTGGSLRL | 20 |
| | SCAASGRTFSSYAMGWFRQA | |
| | PGKEPERDFVAALRWSNDRT | |
| | YYKYYADSVKGRFTISRDNA | |
| | KNTVYLQMNTLKPEDTAVYY | |
| | CAGGNYFSDPRVDKEYNYWG | |
| | QGTQVTVSS | |
| 03D09R3 | QVQLVESGGGLVQAGGSLRL | 21 |
| | SCAASGRTVSSVAMGWFRQA | |
| | PGKEREFVATISWTGGSTYY | |
| | ADSVKGRFTISRDNAKNTAY | |
| | LQMNSLKPEDTAVYYCAAGY | |
| | PADPIALMTLRYEYDYWGQG | |
| | TLVTVSS | |
| 03H01R3 | EVQLVESGGGLVQAGGSLRL | 22 |
| | SCAASGRTSSIYNMGWFRQA | |
| | PGQEREFVAAIHWGGGRTYY | |
| | ADSVKGRFTISRDNAKNTVY | |
| | LQMNSLEPGDTANYYCAARR | |
| | APELLDDYKQKPEEIGTYHY | |
| | VVGQGTQVTVSS | |
| 01B12R2 | EVQLVESGGGLVQAGGSLRL | 23 |
| | SCAASGRTFSSGIMGWFRQA | |
| | PGKEREFVAAIEWSGGNTYK | |
| | YYAESVKGRFAISRDNAKTT | |
| | AYLQMGSLNPEDTALYYCAA | |
| | DESPSRYIDLRRPAPYHYWG | |
| | QGTLVTVSS | |
| 01F01R2 | QVQLVESGGGLVQAGGSLRL | 24 |
| | SCAASGRTFSSNPMGWFRQA | |
| | PGKEREFVAAISWSGGGTYY | |
| | ADSVKGRFTISRDNAKNTVT | |
| | LQMNSLKPEDTAVYYCASRD | |
| | YSDPISLWVEDREYDYWGQG | |
| | TQVTVSS | |
| 01F03R2 | QVQLVESGGGLVQAGGSLRL | 25 |
| | SCAASGRTFSSYAMGWFRQA | |
| | PGKEREFVAVISWSGGSTYY | |
| | ADSVKGRFTISRDNAKNTVY | |
| | LQMNSLKPEDTAVYYCASGE | |
| | QPGSNRPYIPEQPIEFMPTD | |
| | YPSWYDYVVGQGTQVTVSS | |
| 02G06R3 | EVQLVESGGGLVQAGGSLRL | 26 |
| | SCAASGRTFDSYAMGWFRQA | |
| | PGKEREFVAAISVVTGGSTD | |
| | YADSVKGRFTISRDNAKNTV | |
| | YLQMDSLKPEDTAVYYCAAE | |
| | VVGRDVTTMYRVSGLEYEYD | |
| | YWGQGTQVTVSS | |
| 01G09R2 | EVQLVESGGGLVQAGGSLRL | 27 |
| | SCAASGRTINTYVMGWFRQA | |
| | PGKEREFVARIDWSGSSTDY | |
| | ADSAKGRFTISRDNAKNTVY | |
| | LQMNSLKPEDTAVYYCAGSA | |
| | YYSGYVTHRDFGSWGQGTLV | |
| | TVSS | |
| 01D01R3 | EVQLVESGGGLVQAGGSLRL | 28 |
| | SCAASGRTFSVYGMGWFRQA | |
| | PGQERAFVAAISWSDGSTYY | |
| | ADSVKGRFTISRDNAKNTMY | |
| | LQMNSLKPEDTAVYFCAADL | |
| | TGWGLDADVSEYDYWGQGTQ | |
| | VTVSS | |
| 01D02R3LS | QVQLVESGGGLVQAGDSLTL | 29 |
| | SCAASGRSVGFDTYGMAWFR | |
| | QAPGKEREFVASIAYNGETT | |
| | SYADSVQGRFTVTRENAKNT | |
| | IALRMNGLKPDDTAVYYCAA | |
| | AQYYLTGTSFPAKFWGQGTL | |
| | VTVSS | |
| 03A08R3 | QVQLVESGGGLVQAGGSLRL | 30 |
| | SCAASGRTSSIYGMGWFRQA | |
| | PGKEREFVAAISWSAGRTYH | |
| | ADSVKGRFTISRDNAKNMVY | |
| | LQMDKMKPGDTAVYYCAARR | |
| | APELLSDYTQKPEEIGTYHY | |
| | WGQGTLVTVSS | |
| 02G04R3 | QVQLVESGGGLVQAGGSLRL | 31 |
| | SCAANGRAANAYAVGWFRQA | |
| | PGKEREFVAHIRWNGGRTAY | |
| | ADSVKGRFTISRDDAKNTVY | |
| | LQMDSLKPEDTAVYYCAEDT | |
| | NPDAFGDLRLPSEYEYWGQG | |
| | TQVTVSS | |
| 01C04R3 | QVQLVESGGGLVQAGDSLRL | 32 |
| | SCAASGRALSFNTYAMAWFR | |
| | QAPGKEREFVASITYNGGST | |
| | YYADSVKGRFTVTRDNGKDT | |
| | VTLRMNSLKPDDTAVYYCAS | |
| | AQYWRSGTSFPANYWGQGTL | |
| | VTVSS | |
| 01G02R2LS | QVQLVESGGGLVQAGDSLAL | 33 |
| | SCAGSGDTFSNYAMGWFRQA | |
| | PGKEREFVADISWYGANIGY | |
| | ADSVKGRFTISRDNAKNMVT | |
| | LRMNSLKPEDTAVYYCAADR | |
| | NHWPVKGDYWGQGTQVTVSS | |
| 01C02R3LS | QVQLVESGGGLVQAGDSLRL | 34 |
| | SCAASGRTRTTYGMGWFRQA | |
| | PGKEREFVTTITWSGSTNYK | |
| | YYADSVKGRFTISRDNAKNT | |
| | VYLQMNSLKPDDTAVYYCAA | |
| | STVLTDPRVPTEYDYWGQGT | |
| | QVTVSS | |
| 01C05R3LS | EVQLVESGGGLVQAGGSLRL | 35 |
| | SCAASGRTINTYVMGWFRQA | |
| | PGKEREFVARIDWSGSSTDY | |
| | ADSVKGRFTISRDNAKNTVY | |
| | LQMNSLKPEDTAVYYCAGSA | |
| | YYSGYVTHRDFGSWGQGTLV | |
| | TVSS | |
| 03D01R3 | EVQLVESGGGLVQPGGSLRL | 36 |
| | SCAASGFTFRTYYMGWFRQA | |
| | PGKEREFVGVTRSSDDVTYY | |
| | ADSVKGRFTISRDNAKNTVY | |
| | LQMSRLKPEDTAVYYCAAKP | |
| | VPITRYSFPQIGEEYDYWGQ | |
| | GTLVTVSS | |
| 02B12R3 | QVQLVESGGGWVQTGGSLRL | 37 |
| | SCAASGRTVSSYYMGVVFRQ | |
| | TPGKEREFVAAISWVGSSTY | |
| | KYYTDSAKGRFTISRDNAKN | |
| | TVYLQMNSLKPEDTAVYYCA | |
| | ARPRVGDPRSRYDDDNWGQG | |
| | TQVTVSS | |
| 01G07R3 | QVQLVESGGGLVQAGDSLRL | 38 |
| | SCAASGRTLSFDTYAMGWFR | |
| | QAPGKEREFVASIDWSGGTT | |
| | YYADSVKGRFTVTRDNAKNT | |
| | VTLRMNSLKPADTAVYYCAA | |
| | AQYYRSGTSFPANYWGQGTL | |
| | VTVSS | |
| 01B08R2 | EVQLVESGGRLVQAGGSLRL | 39 |
| | SCAASGLTRSDYAMGWFRQA | |
| | PGKEREFVATLKWSEGSRFM | |
| | YRAEDVKGRFTISSGAAKTT | |
| | VWLDMDALNPEDTAVYYCAA | |
| | GFNVGFVRRASEYNFWGQGT | |
| | LVTVSS | |
| 01C02R3 | QVQLVESGGGLVQAGGSLRL | 40 |
| | SCAASGLSFSSYTMGWFRQV | |
| | PGKERELISAIHWSGGPTFY | |
| | SNSVKGRFTISRDNAKDTVY | |
| | LQMNSLKPEDTAVYYCTAEP | |
| | VGSMISPDWTYWGQGTLVTV | |
| | SS | |
| 02B09R3 | EVQLVESGGGLVQPGGSLRL | 41 |
| | SCAASGFTFRTYYMGWFRRA | |
| | PGKEREFVGVTRSSDDVTYY | |
| | ADSVKGRFTISRDNAKDTVY | |
| | LQMSRLKPEDTAVYYCAAKP | |
| | VPITRYSFPQIGEEYDYWGQ | |
| | GTLVTVSS | |
| 03H05R3 | QVQLVESGGGLVQAGGSLSL | 42 |
| | SCAASGRSLSFDTYAMSWFR | |
| | QAPGKEREFVASIDVVNGGS | |
| | TSYADSMKGRFTISRDNAKN | |
| | TVNLRIRSLKPDDTAVYFCA | |
| | SARYYIGGTYFPANYWGQGT | |
| | QVTVSS | |
| 01F08R3LS | QVQLVESGGGLVQAGGSLRL | 43 |
| | SCEASGRAFSTYAMGWFRQA | |
| | PGKEREFVAGIAWSGYSTDY | |
| | ADSVKGRSTISRDNTKNTVW | |
| | LQMNSLKPEDTAVYYCAGER | |
| | NFGRVGVKEVEYDYWGQGTQ | |
| | VTVSS | |
| 02D06R3 | QVQLVESGGGLVQPGGRLRL | 44 |
| | SCAASGSIFSIRDMAWYRQA | |
| | PGKQREWVAIAARGGSTHYA | |
| | DSVKGRFTISRDNAKNTVYL | |
| | QMNTLEPEDTAAYYCNAEVA | |
| | TMIQPGFRDYWGQGTQVTVS | |
| | S | |
| 01B11R3LS | EVQLVESGGGVVQAEDSLRL | 45 |
| | SCAAPGLPFSSSRMGWFRQA | |
| | PGKEREFVAAIGVVSGRSTY | |
| | RYYGDSVKGRFTVSGDNAKN | |
| | TLDLQMKGLKPEDTAVYYCA | |
| | ADPDYYGDYRTSGAWRYWGQ | |
| | GTQVTVSS | |
| 01G09R3LS | EVQLVESGGGLVQAGDSLRL | 46 |
| | SCAASGRTFPTYAMGWFRQA | |
| | PGKEREFVATIRWSGSTQYK | |
| | YYADFVKGRFTISRDNAKNT | |
| | VYLQMDSLKPEDTAVYYCAA | |
| | TTLLTDPRALNAYAYWGQGT | |
| | QVTVSS | |
| 01D09R3 | QVQLVESGGGLVQAGGSLRL | 47 |
| | SCAASGRTFSVYAMGVVFRQ | |
| | APGKERQFVAAITWSGGSTS | |
| | YADSVKGRFTISRDNAKNTV | |
| | YLQMNILKPEDTAVYYCAAA | |
| | TNPYFSDYYPDLKYEFDYWG | |
| | QGTLVTVSS | |
| 01F03R3LS | EVQLVESGGGLVQAGGSLRL | 48 |
| | SCAASGRTINGYVMGWFRQA | |
| | PGEEREFVARIDWSGSSTDY | |
| | ADSVKGRFTISRDNAKITVY | |
| | LQMNSLKPEDTAVYYCAGSA | |
| | YYSGYVTHRDFGSWGQGTLV | |
| | TVSS | |
| 02C10R3 | EVQLVESGGGLVQPGGSLRL | 49 |
| | SCAASGFTFSSFTMTWFRQA | |
| | PGKGLGWVSRISSDGTGTNY | |
| | ADSVKGRFTISRDNAKNTLY | |
| | LRMNSLKPEDTAVYYCAIAD | |
| | DSSTRGQGTLVTVSS | |
| 01E03R3 | QVQLVESGGGLVQTGGSLRL | 50 |
| | SCAASGRTFSVYRVGWFRQA | |
| | PGKEREFVAAVIWSGASTYK | |
| | YAADSVKGRFTISRDNAENT | |
| | VYLQMNSLKPEDTAVYYCAA | |
| | DPLGLPGPDVRVEGGYRHWG | |
| | QGTLVTVSS | |
| 01C01R2LS | QVQLVESGGGLQQAGGSLRL | 51 |
| | SCAASGRTVTVMTVGWFRQA | |
| | PGKEREFVAAITMYGERTYY | |
| | ADSVKGRFTISRDNAKNTVD | |
| | LQMNSLKPEDAAVYYCAART | |
| | YVSGIYDRFDDYNYWGQGTQ | |
| | VTVSS | |
| 03G05R3 | EVQLVESGGGLVQAGDSLRL | 52 |
| | SCAASGRALSFNTYAMAWFR | |
| | QAPGKEREFVASITYNGGST | |
| | YYADSVKGRFTVTRDNGKNT | |
| | VTLRMNSLKPDDTAVYYCAS | |
| | AQYWRSGTSFPANYWGQGTQ | |
| | VTVSS | |
| 01B04R3L | EVQLVESGGGLVQAGDSLRL | 53 |
| | SCAASGRTFTTYVMGWFRQA | |
| | PGKEREFVATIAWSGSTNYK | |
| | YYADSVKGRFTISRDNAKNT | |
| | VYLRMNSLKPEDTAVYYCAA | |
| | STVLTDPRRLNEYANWGQGT | |
| | LVTVSS | |
| 02H11R3 | EVQLVESGGGSVQAGGSLRL | 54 |
| | SCAASGRTFSNYAMGWFRQA | |
| | PGKEREFVAGISRSGGSTYS | |
| | ADSVKGRFTISRDNAKNTVY | |
| | LQMNSLKPEDTAVYYCAADG | |
| | LDYALGFRGDYWGQGTQVTV | |
| | SS | |
| 01C12R2 | EVQLVESGGGLVQAGGSLRL | 55 |
| | SCAASGRTFGSYSMGWFRQA | |
| | PGKEREFVGAISWSGSSTYK | |
| | YYEDSVKGRFTISRDNAKNT | |
| | VPLQMNSLKPEDTGVYFCGG | |
| | TMERRDPRRTSAYDYWGQGT | |
| | LVTVSS | |
| 01C11R2 | EVQLVESGGGLVQTGGSLRL | 56 |
| | SCAASGRTFSTYRMGWFRQA | |
| | PGKEREFVAAISWSTGSTYY | |
| | ADSVKGRFAISRDNAKNTIY | |
| | LQMNSLKPEDTAVYYCAAGM | |
| | VATTRSSAYPYWGQGTQVTV | |
| | SS | |
| 01E02R3LS | EVQLVESGGGLVETGGSLRL | 57 |
| | SCAASGRTESTYTMAWFRQA | |
| | PGKERERVATISFSGSTTTY | |
| | LASVQGRFTISRDGAKNTIF | |
| | LQMNGLKPEDTAVYYCALDT | |
| | RRRVGSSPRFYDYWGQGTLV | |
| | TVSS | |
| 02E01R3LS | QVQLVESGGGLVQAGDSLRL | 58 |
| | SCAASGRTFTTYGMGWFRQA | |
| | PGKEREFVTTITWSGSTNYK | |
| | YYADSVKGRFTISRDNAKNT | |
| | VYLQMNSLKPDDTAVYYCAA | |
| | STVLRDPRVPTEYDYWGQGT | |
| | QVTVSS | |
| 01H05R3 | QVQLVESGGGLVQAGGSLRL | 59 |
| | SCAASGRSLGFDTYGMAWFR | |
| | QAPGKEREFVASIDWNGGST | |
| | YYADSMKGRFTISRDNAKNT | |
| | VNLRMNSLKPDDTAVYYCAA | |
| | ARYYTSSTYFPANYWGQGTQ | |
| | VTVSS | |
| 03C05R3 | EVQLVESGGGLVKAEGSLRL | 60 |
| | SCVASTSIASINVMGWYRQA | |
| | PGKERELVARISGGGITHYA | |
| | ESVEGRFTISRDNAKNTVHL | |
| | QMNGLKPEDTAAYYCKADVF | |
| | ASSGHVTTYWGQGTLVTVSS | |
| 01A09R3LS | QVQLVESGGGLVQAGGSLRL | 61 |
| | SCAASGRSFSSYNMVWLRQA | |
| | PGKEREWAAVTWSGGGTSYA | |
| | DSVKGRFTISRDNANVRVYL | |
| | QMTGLKPEDTAIYYCAATQD | |
| | WYGGSRAFRAASFHSWGQGT | |
| | LVTVSS | |
| 01B10R3L | QVQLVESGGGLVQAGDSLRL | 62 |
| | SCAASGRTFTTYVMGWFRQP | |
| | PGKEREFVATISWSGSTTYK | |
| | YYADSVKGRFTISRDNAKNT | |
| | VYLQMNSLKPEDTAVYYCAA | |
| | STVVADPRAPNEYDYWGQGT | |
| | QVTVSS | |
| 01H02R3LS | QVQLVESGGGLVQPGGSLRL | 63 |
| | SCAASGSIFSASVMGWYRQG | |
| | PGKQREFVARISPGGVTHYA | |
| | DSVKGRFTISKDNAKNTVTL | |
| | QMNSLKPEDTAVYYCNADRF | |
| | GFEVYWGQGTLVTVSS | |
| 01C03R3L | QVQLVESGGGLVQPGGRLRL | 64 |
| | SCAASGSIFSIRDMGWYRQA | |
| | PGKQRELVAIFARGGSTHYA | |
| | DSVKGRFTISRDNAKNTVYL | |
| | QMNSLEPEDTAAYYCNAEVA | |
| | TMIQPGFRDYWGQGTLVTVS | |
| | S | |
| 01D04R3LS | EVQLVESGGGLVQAGGSLRL | 65 |
| | SCAASGRTFRSYAMGWFRQA | |
| | PGKEREFVADISWRGGRLYY | |
| | ADSVKGRFTISRDNAKNTVY | |
| | LQMNSLKPEDTAVYYCAATG | |
| | DQPAFTTAQGMGAMLEYDYW | |
| | GQGTLVTVSS | |
| 01B03R2LS | EVQLVESGGGLVQAGDSLRL | 66 |
| | SCAASGRTGSSGAMGWFRQG | |
| | PGKEREFVAALMWRNTVTYS | |
| | YYADSVKGRFTISRDNAKNT | |
| | AYLQMNSLKPEDTAVYYCAA | |
| | DPDTYGDPRNSGAYSYWGQG | |
| | TLVTVSS | |
| 03F01R3 | QVQLVESGGGLVQAGESLRL | 67 |
| | SCAASGDVFDIGTMAWYRQP | |
| | PGKQRELVASITMGGSTDVA | |
| | DSAKGRFTISRDNAKNTVYL | |
| | HMDSLKPEDTAVYYCNAQFF | |
| | WPKRHDYWGQGTQVTVSS | |
| 01A04R3LS | QVQLVESGGGSVQPGGSLRL | 68 |
| | SCAASGIDVSISTIMWYRQP | |
| | PGRQRELVADVIPSGRSTTY | |
| | TESVKGRFTVTRDNAKNTVY | |
| | LQMSGLKPEDTAVYYCNAFV | |
| | RRENYWGQGTQVTVSS | |
| 01F03R2LS | EVQLVESGGGLVQAGDSLRL | 69 |
| | SCAASGRTGSSGAMGWFRQG | |
| | PGKEREFVAALMWRNTVTYK | |
| | YYEDSVKGRFTISRDNAKNT | |
| | AYLQMNSLKPEDTAVYYCAA | |
| | DPDTYGDPRNSGAYDYWGQG | |
| | TLVTVSS | |
| 03G07R3 | EVQLVESGGGLVQAGDSLRL | 70 |
| | SCAASGRTLSFDTYAMAWFR | |
| | QAPGKEREFVASIDYNGGST | |
| | DYADSVKGRFTVTRDNAKNT | |
| | VTLRMNSLKPDDTAVYYCAS | |
| | ARYYRSGTSFPVNYWGQGTQ | |
| | VTVSS | |
| 01B02R2L | EVQLVESGGGLVQAGGSLKL | 71 |
| | ACAASGLTFSSYRMGWFRQA | |
| | PGKEREFVAAIDWNGRGTYY | |
| | RYYADSVKGRFTISRDNAKN | |
| | TMCLQMNSLKPEDTAVYYSA | |
| | IDSRTSIDPRTSGHYRYWGQ | |
| | GTLVTVSS | |
| 01E04R3LS | EVQLVESGGGLVQAGDSLRL | 72 |
| | SCAASGRTFTTYVMGWFRQA | |
| | PGKDREFVATITWSGSTNYK | |
| | YYADPVKGRFTISRDNAKNT | |
| | VYLQMNSLKPEDTAVYYCTS | |
| | STWTDPRKLNEYAYWGQGTL | |
| | VTVSS | |
| 01F12R2 | EVQLVESGGGLVQPGGSLRL | 73 |
| | SCAASGRTFSSYTMGWFRQA | |
| | PGEEREFVSAISWSSDGTYY | |
| | KYYTDTVKGRFTISRDNAET | |
| | TVHLQMNSLKPEDTAVYYCA | |
| | ASSSGTYGDPRSEREYRYWG | |
| | QGTLVTVSS | |
| 01G07R2L | QVQLVESGGGLVQPGGSLRL | 74 |
| | SCVASGLPFSSSRMAWFAQA | |
| | PGKEREFVAAIGWRGRTSYK | |
| | YYADSVKGRFTVSGDNAKKT | |
| | LDLQMKDLKPEDTALYFCAA | |
| | HPNDDGDPRISGNYQYWGQG | |
| | TQVTVSS | |
| 01F09R3 | QVQLVESGGGLAQAGGSLTL | 75 |
| | SCAASGTAAGIDVMGWYRQT | |
| | PGNSREFVARIFSNDVTHYA | |
| | DSVTGRFTLSRTQDKNTVSL | |
| | QMNSLKPDDTGVYYCNARIW | |
| | TGSTTVDYWGQGTQVTVSS | |
| 01A03R3L | EVQLVESGGGLVQPGGQLRL | 76 |
| | SCAASGSIASVRDMAWYRQA | |
| | PGKQRGLVAIFARGGTTHYA | |
| | DSVKGRFTISRDNAKNTVYL | |
| | QMNSLEPEDTAAYYCNAEVA | |
| | TMFQPGFRDYWGRGTLVTVS | |
| | S | |
| 01G03R3L | QVQLVESGGGSVQAGGSLRL | 77 |
| | SCAASGRTFSNYAMGWFRQA | |
| | PGKEREFVAGISRSGGSTYS | |
| | ADSVKGRFTISRDNAKNTVY | |
| | LQMNSLKPEDTAVYYCAADG | |
| | LDYALGFRGDYWGQGTLVTV | |
| | SS | |
| 01H11R3LS | QVQLVESGGGLVQAGGSLRL | 78 |
| | SCAASGRTINGYVMGWFRQA | |
| | PGKEREFVARIDWSGSSTDY | |
| | ADSVKGRFTISRDNAKTTVY | |
| | LQTNSLKPEDTAVYYCAGSA | |
| | YYSGYVTHRDFGSWGQGTQV | |
| | TVSS | |
| 01F05R2LS | QVQLVESGGGLVQAGGSLRL | 79 |
| | SCAASGSIFAINGMGWYRQA | |
| | PGKQRELVAVITRGGSTNYA | |
| | DSVKGRFTISRDNAKNTVSL | |
| | QMNSLKPEDTAVYYCAATGV | |
| | LAGWAAGDGMDYWGKGTLVT | |
| | VSS | |
| 01D05R2LS | EVQLVESGGGLVQTGGSLRL | 80 |
| | SCAASGRTFSPYAMGWFRQA | |
| | PGKEREFVAAIRWSGATTYK | |
| | YVGDSVQGRFTISRDAAGNT | |
| | VYLQMNSVKPEDTAVYYCAA | |
| | DRVPKDISIDPRNPKDWDYW | |
| | GKGTLVTVSS | |
| 01H03R2L | EVQLVESGGGLVRAGGSLRL | 81 |
| | SCAASGRSFSSYNMGWFRQA | |
| | PGKERDLVAVVTWSGGGTSY | |
| | ADSVKGRFTISRDNANARLY | |
| | LEMTSLKPEDTAIYYCAATQ | |
| | DWYGGTRAFHAASFHSWGQG | |
| | TLVTVSS | |
| 01B04R2 | EVQLVESGGGLVQAGGSLRL | 82 |
| | SCAASGRTFTSYTMGWFRQA | |
| | PGKEREFVAAIKWNGGSTYY | |
| | ADSVKGRFTISRDNAKNTVY | |
| | LQMNSLKPEDTAVYYCAADG | |
| | DPYFSPTDGIVWHAPHQSEY | |
| | DYWGQGTLVTVSS | |
| 01C09R3 | EVQLVESGGGLVQAGGSLRL | 83 |
| | SCAASGFTFRTYYMGWFRQA | |
| | PGKEREFVGVTRSSDDVTYY | |
| | ADSVKGRFTISRDNAKNTVY | |
| | LQMSRLKPEDTAVYYCAAKP | |
| | VPITRYSFPQIGEEYDYWGQ | |
| | GTLVTVSS | |
| 01B12R3LS | EVQLVESGGGLVQAGGSLRL | 84 |
| | SCAASGRTINGYVMGWFRQA | |
| | PGKEREFVARIDWSGSSTDY | |
| | ADSVKGRFTISRDNAKTTVY | |
| | LQMNSLKPEDTAVYYCAGSA | |
| | YYSGYVTHRDFGSWGQGTQV | |
| | TVSS | |
| 01A01R3 | EVQLVESGGGLVQAGGSLRL | 85 |
| | SCAASGSGRTFTSYTMGWFR | |
| | QAPGKEREFVSALTWADDST | |
| | YYKYYADSMKGRLTISRDNA | |
| | KNTVYLQMNSLKPEDTAVYY | |
| | CVATGRGLTYDPRDRRKYDY | |
| | WGQGTQVTVSS | |
| 01G10R3LS | EVQLVESGGGLVQAGGSLRL | 86 |
| | SCAASGRTINTYVTGWFRQA | |
| | PGKEREFVARIDWSGSSTDY | |
| | ADSVKGRFTISRDNAKNTVY | |
| | LQMNSLKPEDTAVYYCAGSA | |
| | YYSGYVTHRDFGSWGQGTQV | |
| | TVSS | |
| 01G08R3LS | QVQLVESGGGLVQAGDSLRL | 87 |
| | SCAASGRTFTTYGMGWFRQG | |
| | PGKEREFVATITWSGSTNYK | |
| | YYTDSVKGRFTISRDNAKNT | |
| | VYLQMNSLKPEDTAVYYCAA | |
| | STVLTDPRRLNEYDYWGQGT | |
| | QVTVSS | |
| 01H06R3L | EVQLVESGGGLVQAGDSLRL | 88 |
| | SCAASGRTRTTYGMGWFRQA | |
| | PGKEREFVTTITWSGPTNYK | |
| | YYADSVKGRFTISRDNAKNT | |
| | AYLQMNSLKPDDTAVYYCAA | |
| | STVLTDPRVPTEYDYWGQGT | |
| | QVTVSS | |
| 01A07R3LS | QVQLVESGGGLVQAGDSLRL | 89 |
| | SCAASGRTFPTYAMGWFRQA | |
| | PGKEREFVATIRWSGSTQYK | |
| | YYADFVKGRFTISRDNAKNT | |
| | VYLQMDSLKPEDTAVYYCAA | |
| | TTLLGDPRALNEYAYWGQGT | |
| | QVTVSS | |
| 03D12R3 | QVQLVESGGGLVQAGGSLRL | 90 |
| | SCAASGRTFSSYAMGWFRQA | |
| | PGKEREFAAVITWNGGSTHY | |
| | ADSVKGRFTISRDNAKNTVY | |
| | LQMNSLKPEDTAVYYCAADP | |
| | MNSPYVVGQGTQVTVSS | |
| 01A07R3 | EVQLVESGGGLVQTGESLRL | 91 |
| | SCAASGRAFSDLRMAWFRQV | |
| | PGKEREFVAAVEWRGSSRYY | |
| | YSADSVKGRFTISRTSPKGE | |
| | TYLQMNGLKPEDTAVYYCAA | |
| | VSPWGDPRNSDTYNYVVGQG | |
| | TQVTVSS | |
| 02B11R3 | EVQLVESGGGLVQAGGSLRL | 92 |
| | SCAASGRTFSPYGMGWFRQT | |
| | PGKERAFVAAVDWNDGSTYY | |
| | SDSVKGRFTISRDNAKNTVY | |
| | LQMNSLKSEDTAVYYCAADL | |
| | TGWGLDADVSEYDYWGQGTL | |
| | VTVSS | |
| 01B07R3L | EVQLVESGGGVVQAEDSLRL | 93 |
| | SCAASGLPFSSSRMGWFRQV | |
| | PGKEREFVAAIGVVSGRSTY | |
| | RYYDDSVKGRFTVSGDNAKN | |
| | TLDLQMKGLKPEDTAVYYCA | |
| | ADPNYYGDVRTSGTYQYWGQ | |
| | GTQVTVSS | |
| 01G05R2LS | QVQLVESGGGLVQAGDSLAL | 94 |
| | SCAGSGDTFSNYAMGWFRQA | |
| | PGKEREFVADISWYSANIGY | |
| | ADSVKGRFTISRDNAKNMVT | |
| | LRMNSLKPEDTAVYYCAADR | |
| | NHWPVKGDYWGQGTQVTVSS | |
| 01H10R3 | QVQLVESGGGLVQAGGSLRL | 95 |
| | SCAASGRAFSQYTMGWFRQA | |
| | PGKEREFVTAIRWSGGSIYK | |
| | YYADSVKGRFTISGDNARNT | |
| | VDLQMNSLKPEDTAVYYCAA | |
| | RMSPWGDPRGNEYDYWGQGT | |
| | LVTVSS | |
| 01H10R2 | QVQLVESGGGLVQPGGSLRL | 96 |
| | SCAASGRTSSISTMGWFRQA | |
| | PGKEREFVTAIRWSGSSSYK | |
| | YYADSVKGRFTISRDNARNT | |
| | VYLQMNSLKPEDTAVYYCAA | |
| | QMSLWRDPREIDYDYWGQGT | |
| | LVTVSS | |
| 01C03R3LS | EVQLVESGGGLVQPGGSLRL | 97 |
| | SCVASGLPGSSSRMAWFAQA | |
| | PGKEREFVAAIAWRGRTSYK | |
| | YYSDSVKGRFTVSGDNAKRT | |
| | LDLQMKDLNPEDTALYFCAA | |
| | HPNDDGDPRISGNYQYWGQG | |
| | TQVTVSS | |
| 01C03R3 | QVQLVESGGGLVQAGGSLRL | 98 |
| | SCAASGRTFSSYAMGWFRQA | |
| | PGKEREFVAAIHWNGASTYR | |
| | YSADSVKGRFTISRDNAKNT | |
| | VYLQMNSLKPEDTAAYYCAA | |
| | SPPPTVGDVRDPANYDSWGQ | |
| | GTLVTVSS | |
| 01F04R3LS | EVQLVESGGGLVQAGGSLRL | 99 |
| | SCAASGRTFSRYAMGWFRQA | |
| | PGKEREFVAAIAWSGGAIYY | |
| | ADFVKGQFTISRDNAKNTVD | |
| | LEMNRLKPEDTAVYYCGSTR | |
| | DPRVGDKKFYDYWGQGTQVT | |
| | VSS | |
| 01E01R3LS | QVQLVESGGGLVQAGGSLRL | 100 |
| | SCAASGRSFSSYNMGWFRQA | |
| | PGKERDLVAWTWSGGGTSYA | |
| | DSVKGRFTIARDNANARLYL | |
| | EMTSLKPEDTAIYYCAATQD | |
| | WYGGTRAFRAASFHSWGQGT | |
| | QVTVSS | |
| 03D02R3 | EVQLVESGGGLAQAGGSLRL | 101 |
| | SCTASGTISKIDVMAWYRQT | |
| | PGNERELVARIFSNDVTHYV | |
| | DSAKGRFTLSRAQDKNTVDL | |
| | QMNSLEPDDAAVYYCNAQIW | |
| | SDMRGRMDTYWGQGTLVTVS | |
| | S | |
| 01A02R3 | EVQLVESGGGLVQSGGSLRL | 102 |
| | SCAASGRTFDQFTVGWFRQA | |
| | PGKEREFVTAIRWSGSTTYR | |
| | YYADSVKGRFTISRDNARNT | |
| | VDLQMNSLKPEDSAVYYCAG | |
| | QMSQWSDPRGDDYDSWGQGT | |
| | LVTVSS | |
| 01B06R2LS | QVQLVESGGGLVQTGGSLRL | 103 |
| | SCAASGRTFSPYAMGWFRQA | |
| | PGKEREFVAAIRWSGATTYK | |
| | YVGDSVQGRFTISRDAAGNT | |
| | VYLQMNSVKPEDTAVYYCAA | |
| | DRVPKDISIDPRNPKDWDYW | |
| | GKGTLVTVSS | |
| 02B03R3 | EVQLVESGGGLVQSGGQLRL | 104 |
| | SCAASGSIASIRDMAWYRQA | |
| | PGKQRELVAIFARGGTTHYA | |
| | DSVKGRFTISRDNAKNTVYL | |
| | QMNSLEPEDTAAYYCNAEVA | |
| | TMFQPGFRDYWGRGTLVTVS | |
| | S | |
| 01B07R2L | EVQLVESGGGLVQAGGSLRL | 105 |
| | SCAASGRTFSSDAVGWFRQA | |
| | PGKEREFVAHIHWSGDFTTY | |
| | YYYGDFVKGRFTISRGTAKN | |
| | TVYLQMNSLKPEDTAVYYCA | |
| | APKGAIGDPRSTREYDYWGQ | |
| | GTLVTVSS | |
| 01D07R3LS | QVQLVESGGGLVQAGGSLRL | 106 |
| | SCAASGRTINTYVMGWFRQA | |
| | PGKEREFVARIDWSGSSTDY | |
| | ADSVKGRFTISRDNAKNTVY | |
| | LQMNSLKPEDTAVYYCAGSA | |
| | YYSGYVTHRDFGSWGQGTLV | |
| | TVSS | |
| 03B07R3 | QVQLVESGGGLVQAGGSLRL | 107 |
| | SCAASGRTFSSNPMGWFRQA | |
| | PGKEREFVAAISWSGGGTYY | |
| | ADSVKGRFTISRDNAKNTVT | |
| | LQMNSLKPEDTAVYYCASRD | |
| | YSDPISLWVEDREYDYWGQG | |
| | TLVTVSS | |
| 01A06R3LS | EVQLVESGGGVVQAEDSLRL | 108 |
| | SCAASGLPFSSSRMGWFRQA | |
| | PGKEREFVAAIGWSGRSTYK | |
| | YYADSVKGRFTVSGDNAKKT | |
| | LDLQMKDLKPEDTAVYYCAA | |
| | HPDYYGDPRTSGAYRYWGQG | |
| | TQVTVSS | |
| 01D08R3 | QVQLVESGGGLVQAGDSLRL | 109 |
| | SCAASGRTSSLYNMGWFRQA | |
| | PGQEREFVAAIHWGGGRTYY | |
| | ADSVKGRFTISRDNAKNTVY | |
| | LQMNSLEPGDTANYYCAARR | |
| | APELLDDYKQKPEEIGAYHY | |
| | VVGQGTQVTVSS | |
| 01E03R2 | EVQLVESGGGLVQAGGSLRL | 110 |
| | SCAASGRTFSVYGMGWFRQA | |
| | PGQERAFVAAISWSDGSTYY | |
| | ADSVKGRFTISRDNAKNTMY | |
| | LQMNSLKPEDTAVYFCAADL | |
| | TGWGLDADVSEYDYWGQGTL | |
| | VTVSS | |
| 02D07R3 | EVQLVESGGGLVQPGGQLRL | 111 |
| | SCAASGSIASIRDMAWYRQA | |
| | PGKQRELVAIFARGGTTHYA | |
| | DSVKGRFTISRDNAKNTVYL | |
| | QVNSLEPEDTAAYYCNAEVA | |
| | TMFQPGFRDYWGRGTQVTVS | |
| | S | |
| 01E05R2 | QVQLVESGGGLVQAGGSLRL | 112 |
| | SCAASGRAFSSGRMGWFRQA | |
| | PGKEREFVAAISWSGHTTYK | |
| | YYADSVKGRFTISRENAKNT | |
| | VSLQMNSLKPEDTAVYYCAA | |
| | RQSLVAGGDPRGQSEYDYWG | |
| | QGTLVTVSS | |
| 01A09R2 | EVQLVESGGGLVQAGGSLRL | 113 |
| | SCAASGRTFSSNPMGWFRQA | |
| | PGKEREFVAAISWSGGGTYY | |
| | ADSVKGRFTISRDNAKNTVT | |
| | LQMNSLKPEDTAVYYCASRD | |
| | YSDPISLWVEDREYDYWGQG | |
| | TQVTVSS | |
| 01D06R2 | QVQLVESGGGLVQAGDSLRL | 114 |
| | SCAASGRTLSFDTYAMAWFR | |
| | QAPGKEREFVASIDWNGVNT | |
| | YYADSVKGRFTVTRDNTKNT | |
| | VTLRMNSLKTDDTAVYYCAA | |
| | AQYYRSGTSFPANSWGQGTQ | |
| | VTVSS | |
| 02F10R3 | EVQLVESGGGLVQPGGSLRL | 115 |
| | SCWSGSFFSLRDMGWYRQAP | |
| | GKERELVGIFTRGGTTYYAD | |
| | SVKGRFTISRDNAKNTVDLQ | |
| | MNSLKPEDTAVYTCNAEIRQ | |
| | YSANLYRDFWGQGTQVTVSS | |
| 02H04R3 | EVQLVESGGGLVQPGGRLRL | 116 |
| | SCAASGSIFSIRDMGWYRQA | |
| | PGKQRELVAIFARGGSTHYA | |
| | DSVKGRFTISRDNAKNTVYL | |
| | QMNSLEPEDTAAYYCNAEVA | |
| | TMIQPGFRDYWGQGTQVTVS | |
| | S | |
| 01G04R3 | QVQLVESGGGLVQAGGSLRL | 117 |
| | SCAASGRTFSVYGMGWFRQA | |
| | PGQERAFVAAISWSDGSTYY | |
| | ADSVKGRFTISRDNAKNTMY | |
| | LQMNSLKPEDTAVYFCAADL | |
| | TGWGLDADVSEYDYWGQGTQ | |
| | VTVSS | |
| 01B01R3 | QVQLVESGGGLVQAGGSLRL | 118 |
| | SCAASGRTFSSYAMGWFRQA | |
| | PGKEREFVAVISWSGGSTYY | |
| | ADSVKGRFTISRDNAKNTVY | |
| | LQMNSLKPEDTAVYYCASGE | |
| | QPGSNRPYIPEQPIEFMPTD | |
| | YPSWYDYWGQGTLVTVSS | |
| 03H04R3 | EVQLVESGGGSVRPGGSLTL | 119 |
| | SCATSGPTTSTFAMGWFRQS | |
| | PGNEREIVAAISWTGWATYY | |
| | PDSVKGRFTISRNAAKNAVD | |
| | LHMTNLKSEDTAVYYCAFHP | |
| | DSDPIGLSGYDYWGQGTLVT | |
| | VSS | |
| 01C03R2L | EVQLVESGGGLVQAGGSLRL | 120 |
| | SCAASGRTLRSYIVGWFRQA | |
| | PGKEREFVAAVTWSDGRRVT | |
| | ADPVKGRFTISRDNAKNTVY | |
| | LQMDSLKPEDAAVYYCAVSH | |
| | GGAYVESRAYEYWGQGTQVT | |
| | VSS | |
| 01E09R3LS | EVQLVESGGGLVQAGGSLRL | 121 |
| | SCAASGRTINTYVMGWFRQA | |
| | PGKEREFVARIDWSGSSTDY | |
| | ADSVKGRFTTSRDNAKNTVY | |
| | LQMNGLKPEDTAVYYCAGSA | |
| | YYSGYVTHRDFGSWGQGTLV | |
| | TVSS | |
| 03C10R3 | QVQLVESGGGLVQRGGSLRL | 122 |
| | SCAASGRSLGFDTYAMGWFR | |
| | QAPGKEREFVASIDWNGGNT | |
| | YYADSVKGRFTISRDNAKNT | |
| | VNLRMNSLKPDDTAAYYCAA | |
| | ARYYTSGTYFPANYWGRGTL | |
| | VTVSS | |

TABLE 5B
Sequence Listing Table

| | | SEQ |
|---|---|---|
| | | ID |
| Name | Sequence | NO. |
| 01C08R2L AbM CDR1 | GRTFTTYGVG | 123 |
| 01C08R2L AbM CDR2 | TITWSGSTNYKY | 124 |
| 01C08R2L AbM CDR3 | STVLTDPRVPTEYDY | 125 |
| 01C08R2L Kabat CDR1 | TYGVG | 126 |
| 01C08R2L Kabat CDR2 | TITWSGSTNYKYYADSVKG | 127 |
| 01C08R2L Kabat CDR3 | STVLTDPRVPTEYDY | 128 |
| 01C08R2L Chothia CDR1 | GRTFTTY | 129 |
| 01C08R2L Chothia CDR2 | TWSGSTNY | 130 |
| 01C08R2L Chothia CDR3 | STVLTDPRVPTEYD | 131 |
| 01C08R2L IMGT CDR1 | GRTFTTYG | 132 |
| 01C08R2L IMGT CDR2 | ITWSGSTNYK | 133 |
| 01C08R2L IMGT CDR3 | AASTVLTDPRVPILYDY | 134 |
| 01C08R2L Contact CDR1 | TTYGVG | 135 |
| 01C08R2L Contact CDR2 | FVTTITWSGSTNYKY | 136 |
| 01C08R2L Contact CDR3 | AASTVLTDPRVPTEYD | 137 |
| 01H04R3 AbM CDR1 | GRTFSSLTMA | 138 |
| 01H04R3 AbM CDR2 | AQKWAGATTYTY | 139 |
| 01H04R3 AbM CDR3 | DTSSIVGDPRSPNRYDY | 140 |
| 01H04R3 Kabat CDR1 | SLTMA | 141 |
| 01H04R3 Kabat CDR2 | AQKWAGATTYTYYGDSVKG | 142 |
| 01H04R3 Kabat CDR3 | DTSSIVGDPRSPNRYDY | 143 |
| 01H04R3 Chothia CDR1 | GRTFSSL | 144 |
| 01H04R3 Chothia CDR2 | KWAGATTY | 145 |
| 01H04R3 Chothia CDR3 | DTSSIVGDPRSPNRYD | 146 |
| 01H04R3 IMGT CDR1 | GRTFSSLT | 147 |
| 01H04R3 IMGT CDR2 | QKWAGATTYT | 148 |
| 01H04R3 IMGT CDR3 | AADTSSIVGDPRSPNRYDY | 149 |
| 01H04R3 Contact CDR1 | SSLTMA | 150 |
| 01H04R3 Contact CDR2 | FVAAQKWAGATTYTY | 151 |
| 01H04R3 Contact CDR3 | AADTSSIVGDPRSPNRYD | 152 |
| 01C09R3LS AbM CDR1 | GRTINTYVMG | 153 |
| 01C09R3LS AbM CDR2 | RIDWSGSSTD | 154 |
| 01C09R3LS AbM CDR3 | SAYYSGYVTHRDFGS | 155 |
| 01C09R3LS Kabat CDR1 | TYVMG | 156 |
| 01C09R3LS Kabat CDR2 | RIDWSGSSTDYADSVKG | 157 |
| 01C09R3LS Kabat CDR3 | SAYYSGYVTHRDFGS | 158 |
| 01C09R3LS Chothia CDR1 | GRTINTY | 159 |
| 01C09R3LS Chothia CDR2 | DWSGSS | 160 |
| 01C09R3LS Chothia CDR3 | SAYYSGYVTHRDFG | 161 |
| 01C09R3LS IMGT CDR1 | GRTINTYV | 162 |
| 01C09R3LS IMGT CDR2 | IDWSGSST | 163 |
| 01C09R3LS IMGT CDR3 | AGSAYYSGYVTHRDFGS | 164 |
| 01C09R3LS Contact CDR1 | NTYVMG | 165 |
| 01C09R3LS Contact CDR2 | FVARIDWSGSSTD | 166 |
| 01C09R3LS Contact CDR3 | AGSAYYSGYVTHRDFG | 167 |
| 01B05R2 AbM CDR1 | GRSLSFDTYAMG | 168 |
| 01B05R2 AbM CDR2 | SIDWNGGSTY | 169 |
| 01B05R2 AbM CDR3 | ARYYTSGTYFPANY | 170 |
| 01B05R2 Kabat CDR1 | FDTYAMG | 171 |
| 01B05R2 Kabat CDR2 | SIDWNGGSTYYADSVKG | 172 |
| 01B05R2 Kabat CDR3 | ARYYTSGTYFPANY | 173 |
| 01B05R2 Chothia CDR1 | GRSLSFDTY | 174 |
| 01B05R2 Chothia CDR2 | DWNGGS | 175 |
| 01B05R2 Chothia CDR3 | ARYYTSGTYFPAN | 176 |
| 01B05R2 IMGT CDR1 | GRSLSFDTYA | 177 |
| 01B05R2 IMGT CDR2 | IDWNGGST | 178 |
| 01B05R2 IMGT CDR3 | AAARYYTSGTYFPANY | 179 |
| 01B05R2 Contact CDR1 | SFDTYAMG | 180 |
| 01B05R2 Contact CDR2 | FVASIDWNGGSTY | 181 |
| 01B05R2 Contact CDR3 | AAARYYTSGTYFPAN | 182 |
| 01H08R3 AbM CDR1 | GRTFSNYGMG | 183 |
| 01H08R3 AbM CDR2 | GITRSGRTTYYY | 184 |
| 01H08R3 AbM CDR3 | RQGENNYDPRSGSAYNY | 185 |
| 01H08R3 Kabat CDR1 | NYGMG | 186 |
| 01H08R3 Kabat CDR2 | GITRSGRTTYYYYADAVKG | 187 |
| 01H08R3 Kabat CDR3 | RQGENNYDPRSGSAYNY | 188 |
| 01H08R3 Chothia CDR1 | GRTFSNY | 189 |
| 01H08R3 Chothia CDR2 | TRSGRTTY | 190 |
| 01H08R3 Chothia CDR3 | RQGENNYDPRSGSAYN | 191 |
| 01H08R3 IMGT CDR1 | GRTFSNYG | 192 |
| 01H08R3 IMGT CDR2 | ITRSGRTTYY | 193 |
| 01H08R3 IMGT CDR3 | AARQGENNYDPRSGSAYNY | 194 |
| 01H08R3 Contact CDR1 | SNYGMG | 195 |
| 01H08R3 Contact CDR2 | FVAGITRSGRTTYYY | 196 |
| 01H08R3 Contact CDR3 | AARQGENNYDPRSGSAYN | 197 |
| 01F04R3 AbM CDR1 | GRALSFNTYAMA | 198 |
| 01F04R3 AbM CDR2 | SITYNGGSTY | 199 |
| 01F04R3 AbM CDR3 | AQYWRSGTSFPANY | 200 |
| 01F04R3 Kabat CDR1 | FNTYAMA | 201 |
| 01F04R3 Kabat CDR2 | SITYNGGSTYYADSVRG | 202 |
| 01F04R3 Kabat CDR3 | AQYWRSGTSFPANY | 203 |
| 01F04R3 Chothia CDR1 | GRALSFNTY | 204 |
| 01F04R3 Chothia CDR2 | TYNGGS | 205 |
| 01F04R3 Chothia CDR3 | AQYWRSGTSFPAN | 206 |
| 01F04R3 IMGT CDR1 | GRALSFNTYA | 207 |
| 01F04R3 IMGT CDR2 | ITYNGGST | 208 |
| 01F04R3 IMGT CDR3 | ASAQYWRSGTSFPANY | 209 |
| 01F04R3 Contact CDR1 | SFNTYAMA | 210 |
| 01F04R3 Contact CDR2 | FVASITYNGGSTY | 211 |
| 01F04R3 Contact CDR3 | ASAQYWRSGTSFPAN | 212 |
| 02G03R3 AbM CDR1 | GMPDNIFSIKTMG | 213 |
| 02G03R3 AbM CDR2 | AITSGGSTN | 214 |
| 02G03R3 AbM CDR3 | DLTYIRFQDMEY | 215 |
| 02G03R3 Kabat CDR1 | IFSIKTMG | 216 |
| 02G03R3 Kabat CDR2 | AITSGGSTNYGDSVKD | 217 |
| 02G03R3 Kabat CDR3 | DLTYIRFQDMEY | 218 |
| 02G03R3 Chothia CDR1 | GMPDNIFSIK | 219 |
| 02G03R3 Chothia CDR2 | TSGGS | 220 |
| 02G03R3 Chothia CDR3 | DLTYIRFQDME | 221 |
| 02G03R3 IMGT CDR1 | GMPDNIFSIKT | 222 |
| 02G03R3 IMGT CDR2 | ITSGGST | 223 |
| 02G03R3 IMGT CDR3 | HADLTYIRFQDMEY | 224 |
| 02G03R3 Contact CDR1 | NIFSIKTMG | 225 |
| 02G03R3 Contact CDR2 | LVAAITSGGSTN | 226 |
| 02G03R3 Contact CDR3 | HADLTYIRFQDME | 227 |
| 01E11R2 AbM CDR1 | GLTFSSYTMG | 228 |
| 01E11R2 AbM CDR2 | AISWGGASTW | 229 |
| 01E11R2 AbM CDR3 | GRNNGYATAVRAYDY | 230 |
| 01E11R2 Kabat CDR1 | SYTMG | 231 |
| 01E11R2 Kabat CDR2 | AISWGGASTWYADSVKG | 232 |
| 01E11R2 Kabat CDR3 | GRNNGYATAVRAYDY | 233 |
| 01E11R2 Chothia CDR1 | GLTFSSY | 234 |
| 01E11R2 Chothia CDR2 | SWGGAS | 235 |
| 01E11R2 Chothia CDR3 | GRNNGYATAVRAYD | 236 |
| 01E11R2 IMGT CDR1 | GLTFSSYT | 237 |
| 01E11R2 IMGT CDR2 | ISWGGAST | 238 |
| 01E11R2 IMGT CDR3 | AKGRNNGYATAVRAYDY | 239 |
| 01E11R2 Contact CDR1 | SSYTMG | 240 |
| 01E11R2 Contact CDR2 | FVAAISWGGASTW | 241 |
| 01E11R2 Contact CDR3 | AKGRNNGYATAVRAYD | 242 |
| 01E10R2 AbM CDR1 | GRTLSVDRMG | 243 |
| 01E10R2 AbM CDR2 | ARTWSGSSTYIY | 244 |
| 01E10R2 AbM CDR3 | DVRGGSYDVRRDEGYAY | 245 |
| 01E10R2 Kabat CDR1 | VDRMG | 246 |
| 01E10R2 Kabat CDR2 | ARTWSGSSTYIYYADSVKG | 247 |
| 01E10R2 Kabat CDR3 | DVRGGSYDVRRDEGYAY | 248 |
| 01E10R2 Chothia CDR1 | GRTLSVD | 249 |
| 01E10R2 Chothia CDR2 | TWSGSSTY | 250 |
| 01E10R2 Chothia CDR3 | DVRGGSYDVRRDEGYA | 251 |
| 01E10R2 IMGT CDR1 | GRTLSVDR | 252 |
| 01E10R2 IMGT CDR2 | RTWSGSSTYI | 253 |
| 01E10R2 IMGT CDR3 | AADVRGGSYDVRRDEGYAY | 254 |
| 01E10R2 Contact CDR1 | SVDRMG | 255 |
| 01E10R2 Contact CDR2 | FIAARTWSGSSTYIY | 256 |
| 01E10R2 Contact CDR3 | AADVRGGSYDVRRDEGYA | 257 |
| 01E10R3 AbM CDR1 | GRTFSDYAMG | 258 |
| 01E10R3 AbM CDR2 | AITWNGGSTY | 259 |
| 01E10R3 AbM CDR3 | DPLNSDSAGTYDY | 260 |
| 01E10R3 Kabat CDR1 | DYAMG | 261 |
| 01E10R3 Kabat CDR2 | AITWNGGSTYYADSVKG | 262 |
| 01E10R3 Kabat CDR3 | DPLNSDSAGTYDY | 263 |
| 01E10R3 Chothia CDR1 | GRTFSDY | 264 |
| 01E10R3 Chothia CDR2 | TWNGGS | 265 |
| 01E10R3 Chothia CDR3 | DPLNSDSAGTYD | 266 |
| 01E10R3 IMGT CDR1 | GRTFSDYA | 267 |
| 01E10R3 IMGT CDR2 | ITWNGGST | 268 |
| 01E10R3 IMGT CDR3 | AADPLNSDSAGTYDY | 269 |
| 01E10R3 Contact CDR1 | SDYAMG | 270 |
| 01E10R3 Contact CDR2 | LVAAITWNGGSTY | 271 |
| 01E10R3 Contact CDR3 | AADPLNSDSAGTYD | 272 |
| 01B10R3LS AbM CDR1 | GRTIYGYVMG | 273 |
| 01B10R3LS AbM CDR2 | RIDWSGSSTD | 274 |
| 01B10R3LS AbM CDR3 | SAYYSGYVTHRDFGS | 275 |
| 01B10R3LS Kabat CDR1 | GYVMG | 276 |
| 01B10R3LS Kabat CDR2 | RIDWSGSSTDYADSVKG | 277 |
| 01B10R3LS Kabat CDR3 | SAYYSGYVTHRDFGS | 278 |
| 01B10R3LS Chothia CDR1 | GRTIYGY | 279 |
| 01B10R3LS Chothia CDR2 | DWSGSS | 280 |
| 01B10R3LS Chothia CDR3 | SAYYSGYVTHRDFG | 281 |
| 01B10R3LS IMGT CDR1 | GRTIYGYV | 282 |
| 01B10R3LS IMGT CDR2 | IDWSGSST | 283 |
| 01B10R3LS IMGT CDR3 | AGSAYYSGYVTHRDFGS | 284 |
| 01B10R3LS Contact CDR1 | YGYVMG | 285 |
| 01B10R3LS Contact CDR2 | FVARIDWSGSSTD | 286 |
| 01B10R3LS Contact CDR3 | AGSAYYSGYVTHRDFG | 287 |
| 01C01R2L AbM CDR1 | GRTLRSYIVG | 288 |
| 01C01R2L AbM CDR2 | AVTWSDGRRV | 289 |
| 01C01R2L AbM CDR3 | SRGGAYEYSRAYEY | 290 |
| 01C01R2L Kabat CDR1 | SYIVG | 291 |
| 01C01R2L Kabat CDR2 | AVTWSDGRRVTADPVKG | 292 |
| 01C01R2L Kabat CDR3 | SRGGAYEYSRAYEY | 293 |
| 01C01R2L Chothia CDR1 | GRTLRSY | 294 |
| 01C01R2L Chothia CDR2 | TWSDGR | 295 |
| 01C01R2L Chothia CDR3 | SRGGAYEYSRAYE | 296 |
| 01C01R2L IMGT CDR1 | GRTLRSYI | 297 |
| 01C01R2L IMGT CDR2 | VTWSDGRR | 298 |
| 01C01R2L IMGT CDR3 | AVSRGGAYEYSRAYEY | 299 |
| 01C01R2L Contact CDR1 | RSYIVG | 300 |
| 01C01R2L Contact CDR2 | FVAAVTWSDGRRV | 301 |
| 01C01R2L Contact CDR3 | AVSRGGAYEYSRAYE | 302 |
| 01H01R2LS AbM CDR1 | GRTFSPYAMG | 303 |
| 01H01R2LS AbM CDR2 | AIRWSGATTYKY | 304 |
| 01H01R2LS AbM CDR3 | DRVPKDISIDPRNPKDWDY | 305 |
| 01H01R2LS Kabat CDR1 | PYAMG | 306 |
| 01H01R2LS Kabat CDR2 | AIRWSGATTYKYVGGSVQG | 307 |
| 01H01R2LS Kabat CDR3 | DRVPKDISIDPRNPKDWDY | 308 |
| 01H01R2LS Chothia CDR1 | GRTFSPY | 309 |
| 01H01R2LS Chothia CDR2 | RWSGATTY | 310 |
| 01H01R2LS Chothia CDR3 | DRVPKDISIDPRNPKDWD | 311 |
| 01H01R2LS IMGT CDR1 | GRTFSPYA | 312 |
| 01H01R2LS IMGT CDR2 | IRWSGATTYK | 313 |
| 01H01R2LS IMGT CDR3 | AADRVPKDISIDPR | 314 |
| | NPKDWDY | |
| 01H01R2LS Contact CDR1 | SPYAMG | 315 |
| 01H01R2LS Contact CDR2 | FVAAIRWSGATTYKY | 316 |
| 01H01R2LS Contact CDR3 | AADRVPKDISIDPRNPKDWD | 317 |
| 01C02R2 AbM CDR1 | GRSYAMG | 318 |
| 01C02R2 AbM CDR2 | AISWSGSRTY | 319 |
| 01C02R2 AbM CDR3 | DPDGTVVASSGWTNSYEYGY | 320 |
| 01C02R2 Kabat CDR1 | YAMG | 321 |
| 01C02R2 Kabat CDR2 | AISWSGSRTYYADAVKG | 322 |
| 01C02R2 Kabat CDR3 | DPDGTVVASSGWTNSYEYGY | 323 |
| 01C02R2 Chothia CDR1 | GRSY | 324 |
| 01C02R2 Chothia CDR2 | SWSGSR | 325 |
| 01C02R2 Chothia CDR3 | DPDGTVVASSGWTNSYEYG | 326 |
| 01C02R2 IMGT CDR1 | GRSYA | 327 |
| 01C02R2 IMGT CDR2 | ISWSGSRT | 328 |
| 01C02R2 IMGT CDR3 | AADPDGTVVASSGWT | 329 |
| | NSYEYGY | |
| 01C02R2 Contact CDR1 | YAMG | 330 |
| 01C02R2 Contact CDR2 | FAAAISWSGSRTY | 331 |
| 01C02R2 Contact CDR3 | AADPDGTVVASSGWT | 332 |
| | NSYEYG | |
| 01A09R3L AbM CDR1 | GLSFSLSRMG | 333 |
| 01A09R3L AbM CDR2 | TIEWSGRSTYKY | 334 |
| 01A09R3L AbM CDR3 | NPNNYGDPRTPGAYQY | 335 |
| 01A09R3L Kabat CDR1 | LSRMG | 336 |
| 01A09R3L Kabat CDR2 | TIEWSGRSTYKYYDDSVKG | 337 |
| 01A09R3L Kabat CDR3 | NPNNYGDPRTPGAYQY | 338 |
| 01A09R3L Chothia CDR1 | GLSFSLS | 339 |
| 01A09R3L Chothia CDR2 | EWSGRSTY | 340 |
| 01A09R3L Chothia CDR3 | NPNNYGDPRTPGAYQ | 341 |
| 01A09R3L IMGT CDR1 | GLSFSLSR | 342 |
| 01A09R3L IMGT CDR2 | IEWSGRSTYK | 343 |
| 01A09R3L IMGT CDR3 | AANPNNYGDPRTPGAYQY | 344 |
| 01A09R3L Contact CDR1 | SLSRMG | 345 |
| 01A09R3L Contact CDR2 | FVATIEWSGRSTYKY | 346 |
| 01A09R3L Contact CDR3 | AANPNNYGDPRTPGAYQ | 347 |
| 01F11R2 AbM CDR1 | GRTLNTYVMG | 348 |
| 01F11R2 AbM CDR2 | RIDWSGSTTD | 349 |
| 01F11R2 AbM CDR3 | SAYYSGYVTHRDFGS | 350 |
| 01F11R2 Kabat CDR1 | TYVMG | 351 |
| 01F11R2 Kabat CDR2 | RIDWSGSTTDYADSVKG | 352 |
| 01F11R2 Kabat CDR3 | SAYYSGYVTHRDFGS | 353 |
| 01F11R2 Chothia CDR1 | GRTLNTY | 354 |
| 01F11R2 Chothia CDR2 | DWSGST | 355 |
| 01F11R2 Chothia CDR3 | SAYYSGYVTHRDFG | 356 |
| 01F11R2 IMGT CDR1 | GRTLNTYV | 357 |
| 01F11R2 IMGT CDR2 | IDWSGSTT | 358 |
| 01F11R2 IMGT CDR3 | AGSAYYSGYVTHRDFGS | 359 |
| 01F11R2 Contact CDR1 | NTYVMG | 360 |
| 01F11R2 Contact CDR2 | FVARIDWSGSTTD | 361 |
| 01F11R2 Contact CDR3 | AGSAYYSGYVTHRDFG | 362 |
| 01E01R3 AbM CDR1 | GRTYAMA | 363 |
| 01E01R3 AbM CDR2 | GIRGGGGYTY | 364 |
| 01E01R3 AbM CDR3 | GDSSLTLGTRAYTAEAYEH | 365 |
| 01E01R3 Kabat CDR1 | YAMA | 366 |
| 01E01R3 Kabat CDR2 | GIRGGGGYTYSADSVKG | 367 |
| 01E01R3 Kabat CDR3 | GDSSLTLGTRAYTAEAYEH | 368 |
| 01E01R3 Chothia CDR1 | GRTY | 369 |
| 01E01R3 Chothia CDR2 | RGGGGY | 370 |
| 01E01R3 Chothia CDR3 | GDSSLTLGTRAYTAEAYE | 371 |
| 01E01R3 IMGT CDR1 | GRTYA | 372 |
| 01E01R3 IMGT CDR2 | IRGGGGYT | 373 |
| 01E01R3 IMGT CDR3 | AAGDSSLTLGTR | 374 |
| | AYTAEAYEH | |
| 01E01R3 Contact CDR1 | YAMA | 375 |
| 01E01R3 Contact CDR2 | FVAGIRGGGGYTY | 376 |
| 01E01R3 Contact CDR3 | AAGDSSLTLGTRAYTAEAYE | 377 |
| 03D05R3 AbM CDR1 | GRTFSSNPMG | 378 |
| 03D05R3 AbM CDR2 | AISWSGGGTY | 379 |
| 03D05R3 AbM CDR3 | RDYSDPISLWVEGREYDY | 380 |
| 03D05R3 Kabat CDR1 | SNPMG | 381 |
| 03D05R3 Kabat CDR2 | AISWSGGGTYYADSVKG | 382 |
| 03D05R3 Kabat CDR3 | RDYSDPISLWVEGREYDY | 383 |
| 03D05R3 Chothia CDR1 | GRTFSSN | 384 |
| 03D05R3 Chothia CDR2 | SWSGGG | 385 |
| 03D05R3 Chothia CDR3 | RDYSDPISLWVEGREYD | 386 |
| 03D05R3 IMGT CDR1 | GRTFSSNP | 387 |
| 03D05R3 IMGT CDR2 | ISWSGGGT | 388 |
| 03D05R3 IMGT CDR3 | ASRDYSDPISLWVE | 389 |
| | GREYDY | |
| 03D05R3 Contact CDR1 | SSNPMG | 390 |
| 03D05R3 Contact CDR2 | FVAAISWSGGGTY | 391 |
| 03D05R3 Contact CDR3 | ASRDYSDPISLWVEGREYD | 392 |
| 01H11R2LS AbM CDR1 | GRTLTTYGMG | 393 |
| 01H11R2LS AbM CDR2 | TIKWSGSTNYKY | 394 |
| 01H11R2LS AbM CDR3 | GTVLGDPRVLNEYDY | 395 |
| 01H11R2LS Kabat CDR1 | TYGMG | 396 |
| 01H11R2LS Kabat CDR2 | TIKWSGSTNYKYYADSVKG | 397 |
| 01H11R2LS Kabat CDR3 | GTVLGDPRVLNEYDY | 398 |
| 01H11R2LS Chothia CDR1 | GRTLTTY | 399 |
| 01H11R2LS Chothia CDR2 | KWSGSTNY | 400 |
| 01H11R2LS Chothia CDR3 | GTVLGDPRVLNEYD | 401 |
| 01H11R2LS IMGT CDR1 | GRTLTTYG | 402 |
| 01H11R2LS IMGT CDR2 | IKWSGSTNYK | 403 |
| 01H11R2LS IMGT CDR3 | AAGTVLGDPRVLNEYDY | 404 |
| 01H11R2LS Contact CDR1 | TTYGMG | 405 |
| 01H11R2LS Contact CDR2 | FVATIKWSGSTNYKY | 406 |
| 01H11R2LS Contact CDR3 | AAGTVLGDPRVLNEYD | 407 |
| 01F04R2LS AbM CDR1 | GRTFSSYAMG | 408 |
| 01F04R2LS AbM CDR2 | ALRWSNDRTYYKY | 409 |
| 01F04R2LS AbM CDR3 | GNYFSDPRVDKEYNY | 410 |
| 01F04R2LS Kabat CDR1 | SYAMG | 411 |
| 01F04R2LS Kabat CDR2 | ALRWSNDRTYYKYYADSVKG | 412 |
| 01F04R2LS Kabat CDR3 | GNYFSDPRVDKEYNY | 413 |
| 01F04R2LS Chothia CDR1 | GRTFSSY | 414 |
| 01F04R2LS Chothia CDR2 | RWSNDRTYY | 415 |
| 01F04R2LS Chothia CDR3 | GNYFSDPRVDKEYN | 416 |
| 01F04R2LS IMGT CDR1 | GRTFSSYA | 417 |
| 01F04R2LS IMGT CDR2 | LRWSNDRTYYK | 418 |
| 01F04R2LS IMGT CDR3 | AGGNYFSDPRVDKEYNY | 419 |
| 01F04R2LS Contact CDR1 | SSYAMG | 420 |
| 01F04R2LS Contact CDR2 | FVAALRWSNDRTYYKY | 421 |
| 01F04R2LS Contact CDR3 | AGGNYFSDPRVDKEYN | 422 |
| 03D09R3 AbM CDR1 | GRTVSSVAMG | 423 |
| 03D09R3 AbM CDR2 | TISWTGGSTY | 424 |
| 03D09R3 AbM CDR3 | GYPADPIALMTLRYEYDY | 425 |
| 03D09R3 Kabat CDR1 | SVAMG | 426 |
| 03D09R3 Kabat CDR2 | TISWTGGSTYYADSVKG | 427 |
| 03D09R3 Kabat CDR3 | GYPADPIALMTLRYEYDY | 428 |
| 03D09R3 Chothia CDR1 | GRTVSSV | 429 |
| 03D09R3 Chothia CDR2 | SWTGGS | 430 |
| 03D09R3 Chothia CDR3 | GYPADPIALMTLRYEYD | 431 |
| 03D09R3 IMGT CDR1 | GRTVSSVA | 432 |
| 03D09R3 IMGT CDR2 | ISWTGGST | 433 |
| 03D09R3 IMGT CDR3 | AAGYPADPIALMTL | 434 |
| | RYEYDY | |
| 03D09R3 Contact CDR1 | SSVAMG | 435 |
| 03D09R3 Contact CDR2 | FVATISWTGGSTY | 436 |
| 03D09R3 Contact CDR3 | AAGYPADPIALMTLRYEYD | 437 |
| 03H01R3 AbM CDR1 | GRTSSIYNMG | 438 |
| 03H01R3 AbM CDR2 | AIHWGGGRTY | 439 |
| 03H01R3 AbM CDR3 | RRAPELLDDYKQKP | 440 |
| | EEIGTYHY | |
| 03H01R3 Kabat CDR1 | IYNMG | 441 |
| 03H01R3 Kabat CDR2 | AIHWGGGRTYYADSVKG | 442 |
| 03H01R3 Kabat CDR3 | RRAPELLDDYKQKPE | 443 |
| | EIGTYHY | |
| 03H01R3 Chothia CDR1 | GRTSSIY | 444 |
| 03H01R3 Chothia CDR2 | HWGGGR | 445 |
| 03H01R3 Chothia CDR3 | RRAPELLDDYKQKP | 446 |
| | EEIGTYH | |
| 03H01R3 IMGT CDR1 | GRTSSIYN | 447 |
| 03H01R3 IMGT CDR2 | IHWGGGRT | 448 |
| 03H01R3 IMGT CDR3 | AARRAPELLDDYKQKPE | 449 |
| | EIGTYHY | |
| 03H01R3 Contact CDR1 | SIYNMG | 450 |
| 03H01R3 Contact CDR2 | FVAAIHWGGGRTY | 451 |
| 03H01R3 Contact CDR3 | AARRAPELLDDYKQK | 452 |
| | PEEIGTYH | |
| 01B12R2 AbM CDR1 | GRTFSSGIMG | 453 |
| 01B12R2 AbM CDR2 | AIEWSGGNTYKY | 454 |
| 01B12R2 AbM CDR3 | DESPSRYIDLRRPAPYHY | 455 |
| 01B12R2 Kabat CDR1 | SGIMG | 456 |
| 01B12R2 Kabat CDR2 | AIEWSGGNTYKYYAESVKG | 457 |
| 01B12R2 Kabat CDR3 | DESPSRYIDLRRPAPYHY | 458 |
| 01B12R2 Chothia CDR1 | GRTFSSG | 459 |
| 01B12R2 Chothia CDR2 | EWSGGNTY | 460 |
| 01B12R2 Chothia CDR3 | DESPSRYIDLRRPAPYH | 461 |
| 01B12R2 IMGT CDR1 | GRTFSSGI | 462 |
| 01B12R2 IMGT CDR2 | IEWSGGNTYK | 463 |
| 01B12R2 IMGT CDR3 | AADESPSRYIDLRRPA | 464 |
| | PYHY | |
| 01B12R2 Contact CDR1 | SSGIMG | 465 |
| 01B12R2 Contact CDR2 | FVAAIEWSGGNTYKY | 466 |
| 01B12R2 Contact CDR3 | AADESPSRYIDLRRPAPYH | 467 |
| 01F01R2 AbM CDR1 | GRTFSSNPMG | 468 |
| 01F01R2 AbM CDR2 | AISWSGGGTY | 469 |
| 01F01R2 AbM CDR3 | RDYSDPISLWVEDREYDY | 470 |
| 01F01R2 Kabat CDR1 | SNPMG | 471 |
| 01F01R2 Kabat CDR2 | AISWSGGGTYYADSVKG | 472 |
| 01F01R2 Kabat CDR3 | RDYSDPISLWVEDREYDY | 473 |
| 01F01R2 Chothia CDR1 | GRTFSSN | 474 |
| 01F01R2 Chothia CDR2 | SWSGGG | 475 |
| 01F01R2 Chothia CDR3 | RDYSDPISLWVEDREYD | 476 |
| 01F01R2 IMGT CDR1 | GRTFSSNP | 477 |
| 01F01R2 IMGT CDR2 | ISWSGGGT | 478 |
| 01F01R2 IMGT CDR3 | ASRDYSDPISLWVEDR | 479 |
| | EYDY | |
| 01F01R2 Contact CDR1 | SSNPMG | 480 |
| 01F01R2 Contact CDR2 | FVAAISWSGGGTY | 481 |
| 01F01R2 Contact CDR3 | ASRDYSDPISLWVEDREYD | 482 |
| 01F03R2 AbM CDR1 | GRTFSSYAMG | 483 |
| 01F03R2 AbM CDR2 | VISWSGGSTY | 484 |
| 01F03R2 AbM CDR3 | GEQPGSNRPYIPEQPIEFM | 485 |
| | PTDYPSWYDY | |
| 01F03R2 Kabat CDR1 | SYAMG | 486 |
| 01F03R2 Kabat CDR2 | VISWSGGSTYYADSVKG | 487 |
| 01F03R2 Kabat CDR3 | GEQPGSNRPYIPEQPIE | 488 |
| | FMPTDYPSWYDY | |
| 01F03R2 Chothia CDR1 | GRTFSSY | 489 |
| 01F03R2 Chothia CDR2 | SWSGGS | 490 |
| 01F03R2 Chothia CDR3 | GEQPGSNRPYIPEQPIE | 491 |
| | FMPTDYPSWYD | |
| 01F03R2 IMGT CDR1 | GRTFSSYA | 492 |
| 01F03R2 IMGT CDR2 | ISWSGGST | 493 |
| 01F03R2 IMGT CDR3 | ASGEQPGSNRPYIPEQP | 494 |
| | IEFMPTDYPSWYDY | |
| 01F03R2 Contact CDR1 | SSYAMG | 495 |
| 01F03R2 Contact CDR2 | FVAVISWSGGSTY | 496 |
| 01F03R2 Contact CDR3 | ASGEQPGSNRPYIPEQP | 497 |
| | IEFMPTDYPSWYD | |
| 02G06R3 AbM CDR1 | GRTFDSYAMG | 498 |
| 02G06R3 AbM CDR2 | AISWTGGSTD | 499 |
| 02G06R3 AbM CDR3 | EVVGRDVTTMYRVSG | 500 |
| | LEYEYDY | |
| 02G06R3 Kabat CDR1 | SYAMG | 501 |
| 02G06R3 Kabat CDR2 | AISWTGGSTDYADSVKG | 502 |
| 02G06R3 Kabat CDR3 | EVVGRDVTTMYRVSG | 503 |
| | LEYEYDY | |
| 02G06R3 Chothia CDR1 | GRTFDSY | 504 |
| 02G06R3 Chothia CDR2 | SWTGGS | 505 |
| 02G06R3 Chothia CDR3 | EVVGRDVTTMYRVS | 506 |
| | GLEYEYD | |
| 02G06R3 IMGT CDR1 | GRTFDSYA | 507 |
| 02G06R3 IMGT CDR2 | ISWTGGST | 508 |
| 02G06R3 IMGT CDR3 | AAEVVGRDVTTMYRVSGL | 509 |
| | EYEYDY | |
| 02G06R3 Contact CDR1 | DSYAMG | 510 |
| 02G06R3 Contact CDR2 | FVAAISWTGGSTD | 511 |
| 02G06R3 Contact CDR3 | AAEVVGRDVTTMYRVSG | 512 |
| | LEYEYD | |
| 01G09R2 AbM CDR1 | GRTINTYVMG | 513 |
| 01G09R2 AbM CDR2 | RIDWSGSSTD | 514 |
| 01G09R2 AbM CDR3 | SAYYSGYVTHRDFGS | 515 |
| 01G09R2 Kabat CDR1 | TYVMG | 516 |
| 01G09R2 Kabat CDR2 | RIDWSGSSTDYADSAKG | 517 |
| 01G09R2 Kabat CDR3 | SAYYSGYVTHRDFGS | 518 |
| 01G09R2 Chothia CDR1 | GRTINTY | 519 |
| 01G09R2 Chothia CDR2 | DWSGSS | 520 |
| 01G09R2 Chothia CDR3 | SAYYSGYVTHRDFG | 521 |
| 01G09R2 IMGT CDR1 | GRTINTYV | 522 |
| 01G09R2 IMGT CDR2 | IDWSGSST | 523 |
| 01G09R2 IMGT CDR3 | AGSAYYSGYVTHRDFGS | 524 |
| 01G09R2 Contact CDR1 | NTYVMG | 525 |
| 01G09R2 Contact CDR2 | FVARIDWSGSSTD | 526 |
| 01G09R2 Contact CDR3 | AGSAYYSGYVTHRDFG | 527 |
| 01D01R3 AbM CDR1 | GRTFSVYGMG | 528 |
| 01D01R3 AbM CDR2 | AISWSDGSTY | 529 |
| 01D01R3 AbM CDR3 | DLTGWGLDADVSEYDY | 530 |
| 01D01R3 Kabat CDR1 | VYGMG | 531 |
| 01D01R3 Kabat CDR2 | AISWSDGSTYYADSVKG | 532 |
| 01D01R3 Kabat CDR3 | DLTGWGLDADVSEYDY | 533 |
| 01D01R3 Chothia CDR1 | GRTFSVY | 534 |
| 01D01R3 Chothia CDR2 | SWSDGS | 535 |
| 01D01R3 Chothia CDR3 | DLTGWGLDADVSEYD | 536 |
| 01D01R3 IMGT CDR1 | GRTFSVYG | 537 |
| 01D01R3 IMGT CDR2 | ISWSDGST | 538 |
| 01D01R3 IMGT CDR3 | AADLTGWGLDADVSEYDY | 539 |
| 01D01R3 Contact CDR1 | SVYGMG | 540 |
| 01D01R3 Contact CDR2 | FVAAISWSDGSTY | 541 |
| 01D01R3 Contact CDR3 | AADLTGWGLDADVSEYD | 542 |
| 01D02R3LS AbM CDR1 | GRSVGFDTYGMA | 543 |
| 01D02R3LS AbM CDR2 | SIAYNGETTS | 544 |
| 01D02R3LS AbM CDR3 | AQYYLTGTSFPAKF | 545 |
| 01D02R3LS Kabat CDR1 | FDTYGMA | 546 |
| 01D02R3LS Kabat CDR2 | SIAYNGETTSYADSVQG | 547 |
| 01D02R3LS Kabat CDR3 | AQYYLTGTSFPAKF | 548 |
| 01D02R3LS Chothia CDR1 | GRSVGFDTY | 549 |
| 01D02R3LS Chothia CDR2 | AYNGET | 550 |
| 01D02R3LS Chothia CDR3 | AQYYLTGTSFPAK | 551 |
| 01D02R3LS IMGT CDR1 | GRSVGFDTYG | 552 |
| 01D02R3LS IMGT CDR2 | IAYNGETT | 553 |
| 01D02R3LS IMGT CDR3 | AAAQYYLTGTSFPAKF | 554 |
| 01D02R3LS Contact CDR1 | GFDTYGMA | 555 |
| 01D02R3LS Contact CDR2 | FVASIAYNGETTS | 556 |
| 01D02R3LS Contact CDR3 | AAAQYYLTGTSFPAK | 557 |
| 03A08R3 AbM CDR1 | GRTSSIYGMG | 558 |
| 03A08R3 AbM CDR2 | AISWSAGRTY | 559 |
| 03A08R3 AbM CDR3 | RRAPELLSDYTQKPE | 560 |
| | EIGTYHY | |
| 03A08R3 Kabat CDR1 | IYGMG | 561 |
| 03A08R3 Kabat CDR2 | AISWSAGRTYHADSVKG | 562 |
| 03A08R3 Kabat CDR3 | RRAPELLSDYTQKP | 563 |
| | EEIGTYHY | |
| 03A08R3 Chothia CDR1 | GRTSSIY | 564 |
| 03A08R3 Chothia CDR2 | SWSAGR | 565 |
| 03A08R3 Chothia CDR3 | RRAPELLSDYTQKPE | 566 |
| | EIGTYH | |
| 03A08R3 IMGT CDR1 | GRTSSIYG | 567 |
| 03A08R3 IMGT CDR2 | ISWSAGRT | 568 |
| 03A08R3 IMGT CDR3 | AARRAPELLSDYTQKPE | 569 |
| | EIGTYHY | |
| 03A08R3 Contact CDR1 | SIYGMG | 570 |
| 03A08R3 Contact CDR2 | FVAAISWSAGRTY | 571 |
| 03A08R3 Contact CDR3 | AARRAPELLSDYTQK | 572 |
| | PEEIGTYH | |
| 02G04R3 AbM CDR1 | GRAANAYAVG | 573 |
| 02G04R3 AbM CDR2 | HIRWNGGRTA | 574 |
| 02G04R3 AbM CDR3 | DTNPDAFGDLRLPSEYEY | 575 |
| 02G04R3 Kabat CDR1 | AYAVG | 576 |
| 02G04R3 Kabat CDR2 | HIRWNGGRTAYADSVKG | 577 |
| 02G04R3 Kabat CDR3 | DTNPDAFGDLRLPSEYEY | 578 |
| 02G04R3 Chothia CDR1 | GRAANAY | 579 |
| 02G04R3 Chothia CDR2 | RWNGGR | 580 |
| 02G04R3 Chothia CDR3 | DTNPDAFGDLRLPSEYE | 581 |
| 02G04R3 IMGT CDR1 | GRAANAYA | 582 |
| 02G04R3 IMGT CDR2 | IRWNGGRT | 583 |
| 02G04R3 IMGT CDR3 | AEDTNPDAFGDLRLPSEYEY | 584 |
| 02G04R3 Contact CDR1 | NAYAVG | 585 |
| 02G04R3 Contact CDR2 | FVAHIRWNGGRTA | 586 |
| 02G04R3 Contact CDR3 | AEDTNPDAFGDLRLPSEYE | 587 |
| 01C04R3 AbM CDR1 | GRALSFNTYAMA | 588 |
| 01C04R3 AbM CDR2 | SITYNGGSTY | 589 |
| 01C04R3 AbM CDR3 | AQYWRSGTSFPANY | 590 |
| 01C04R3 Kabat CDR1 | FNTYAMA | 591 |
| 01C04R3 Kabat CDR2 | SITYNGGSTYYADSVKG | 592 |
| 01C04R3 Kabat CDR3 | AQYWRSGTSFPANY | 593 |
| 01C04R3 Chothia CDR1 | GRALSFNTY | 594 |
| 01C04R3 Chothia CDR2 | TYNGGS | 595 |
| 01C04R3 Chothia CDR3 | AQYWRSGTSFPAN | 596 |
| 01C04R3 IMGT CDR1 | GRALSFNTYA | 597 |
| 01C04R3 IMGT CDR2 | ITYNGGST | 598 |
| 01C04R3 IMGT CDR3 | ASAQYWRSGTSFPANY | 599 |
| 01C04R3 Contact CDR1 | SFNTYAMA | 600 |
| 01C04R3 Contact CDR2 | FVASITYNGGSTY | 601 |
| 01C04R3 Contact CDR3 | ASAQYWRSGTSFPAN | 602 |
| 01G02R2LS AbM CDR1 | GDTFSNYAMG | 603 |
| 01G02R2LS AbM CDR2 | DISWYGANIG | 604 |
| 01G02R2LS AbM CDR3 | DRNHWPVKGDY | 605 |
| 01G02R2LS Kabat CDR1 | NYAMG | 606 |
| 01G02R2LS Kabat CDR2 | DISWYGANIGYADSVKG | 607 |
| 01G02R2LS Kabat CDR3 | DRNHWPVKGDY | 608 |
| 01G02R2LS Chothia CDR1 | GDTFSNY | 609 |
| 01G02R2LS Chothia CDR2 | SWYGAN | 610 |
| 01G02R2LS Chothia CDR3 | DRNHWPVKGD | 611 |
| 01G02R2LS IMGT CDR1 | GDTFSNYA | 612 |
| 01G02R2LS IMGT CDR2 | ISWYGANI | 613 |
| 01G02R2LS IMGT CDR3 | AADRNHWPVKGDY | 614 |
| 01G02R2LS Contact CDR1 | SNYAMG | 615 |
| 01G02R2LS Contact CDR2 | FVADISWYGANIG | 616 |
| 01G02R2LS Contact CDR3 | AADRNHWPVKGD | 617 |
| 01C02R3LS AbM CDR1 | GRTRTTYGMG | 618 |
| 01C02R3LS AbM CDR2 | TITWSGSTNYKY | 619 |
| 01C02R3LS AbM CDR3 | STVLTDPRVPTEYDY | 620 |
| 01C02R3LS Kabat CDR1 | TYGMG | 621 |
| 01C02R3LS Kabat CDR2 | TITWSGSTNYKYYADSVKG | 622 |
| 01C02R3LS Kabat CDR3 | STVLTDPRVPTEYDY | 623 |
| 01C02R3LS Chothia CDR1 | GRTRTTY | 624 |
| 01C02R3LS Chothia CDR2 | TWSGSTNY | 625 |
| 01C02R3LS Chothia CDR3 | STVLTDPRVPTEYD | 626 |
| 01C02R3LS IMGT CDR1 | GRTRTTYG | 627 |
| 01C02R3LS IMGT CDR2 | ITWSGSTNYK | 628 |
| 01C02R3LS IMGT CDR3 | AASTVLTDPRVPIEYDY | 629 |
| 01C02R3LS Contact CDR1 | TTYGMG | 630 |
| 01C02R3LS Contact CDR2 | FVTTITWSGSTNYKY | 631 |
| 01C02R3LS Contact CDR3 | AASTVLTDPRVPIEYD | 632 |
| 01C05R3LS AbM CDR1 | GRTINTYVMG | 633 |
| 01C05R3LS AbM CDR2 | RIDWSGSSTD | 634 |
| 01C05R3LS AbM CDR3 | SAYYSGYVTHRDFGS | 635 |
| 01C05R3LS Kabat CDR1 | TYVMG | 636 |
| 01C05R3LS Kabat CDR2 | RIDWSGSSTDYADSVKG | 637 |
| 01C05R3LS Kabat CDR3 | SAYYSGYVTHRDFGS | 638 |
| 01C05R3LS Chothia CDR1 | GRTINTY | 639 |
| 01C05R3LS Chothia CDR2 | DWSGSS | 640 |
| 01C05R3LS Chothia CDR3 | SAYYSGYVTHRDFG | 641 |
| 01C05R3LS IMGT CDR1 | GRTINTYV | 642 |
| 01C05R3LS IMGT CDR2 | IDWSGSST | 643 |
| 01C05R3LS IMGT CDR3 | AGSAYYSGYVTHRDFGS | 644 |
| 01C05R3LS Contact CDR1 | NTYVMG | 645 |
| 01C05R3LS Contact CDR2 | FVARIDWSGSSTD | 646 |
| 01C05R3LS Contact CDR3 | AGSAYYSGYVTHRDFG | 647 |
| 03D01R3 AbM CDR1 | GFTFRTYYMG | 648 |
| 03D01R3 AbM CDR2 | VTRSSDDVTY | 649 |
| 03D01R3 AbM CDR3 | KPVPITRYSFPQIGEEYDY | 650 |
| 03D01R3 Kabat CDR1 | TYYMG | 651 |
| 03D01R3 Kabat CDR2 | VTRSSDDVTYYADSVKG | 652 |
| 03D01R3 Kabat CDR3 | KPVPITRYSFPQIGEEYDY | 653 |
| 03D01R3 Chothia CDR1 | GFTFRTY | 654 |
| 03D01R3 Chothia CDR2 | RSSDDV | 655 |
| 03D01R3 Chothia CDR3 | KPVPITRYSFPQIGEEYD | 656 |
| 03D01R3 IMGT CDR1 | GFTFRTYY | 657 |
| 03D01R3 IMGT CDR2 | TRSSDDVT | 658 |
| 03D01R3 IMGT CDR3 | AAKPVPITRYSFPQI | 659 |
| | GEEYDY | |
| 03D01R3 Contact CDR1 | RTYYMG | 660 |
| 03D01R3 Contact CDR2 | FVGVTRSSDDVTY | 661 |
| 03D01R3 Contact CDR3 | AAKPVPITRYSFPQI | 662 |
| | GEEYD | |
| 02B12R3 AbM CDR1 | GRTVSSYYMG | 663 |
| 02B12R3 AbM CDR2 | AISWVGSSTYKY | 664 |
| 02B12R3 AbM CDR3 | RPRVGDPRSRYDDDN | 665 |
| 02B12R3 Kabat CDR1 | SYYMG | 666 |
| 02B12R3 Kabat CDR2 | AISWVGSSTYKYYTDSAKG | 667 |
| 02B12R3 Kabat CDR3 | RPRVGDPRSRYDDDN | 668 |
| 02B12R3 Chothia CDR1 | GRTVSSY | 669 |
| 02B12R3 Chothia CDR2 | SWVGSSTY | 670 |
| 02B12R3 Chothia CDR3 | RPRVGDPRSRYDDD | 671 |
| 02B12R3 IMGT CDR1 | GRTVSSYY | 672 |
| 02B12R3 IMGT CDR2 | ISWVGSSTYK | 673 |
| 02B12R3 IMGT CDR3 | AARPRVGDPRSRYDDDN | 674 |
| 02B12R3 Contact CDR1 | SSYYMG | 675 |
| 02B12R3 Contact CDR2 | FVAAISWVGSSTYKY | 676 |
| 02B12R3 Contact CDR3 | AARPRVGDPRSRYDDD | 677 |
| 01G07R3 AbM CDR1 | GRTLSFDTYAMG | 678 |
| 01G07R3 AbM CDR2 | SIDWSGGTTY | 679 |
| 01G07R3 AbM CDR3 | AQYYRSGTSFPANY | 680 |
| 01G07R3 Kabat CDR1 | FDTYAMG | 681 |
| 01G07R3 Kabat CDR2 | SIDWSGGTTYYADSVKG | 682 |
| 01G07R3 Kabat CDR3 | AQYYRSGTSFPANY | 683 |
| 01G07R3 Chothia CDR1 | GRTLSFDTY | 684 |
| 01G07R3 Chothia CDR2 | DWSGGT | 685 |
| 01G07R3 Chothia CDR3 | AQYYRSGTSFPAN | 686 |
| 01G07R3 IMGT CDR1 | GRTLSFDTYA | 687 |
| 01G07R3 IMGT CDR2 | IDWSGGTT | 688 |
| 01G07R3 IMGT CDR3 | AAAQYYRSGTSFPANY | 689 |
| 01G07R3 Contact CDR1 | SFDTYAMG | 690 |
| 01G07R3 Contact CDR2 | FVASIDWSGGTTY | 691 |
| 01G07R3 Contact CDR3 | AAAQYYRSGTSFPAN | 692 |
| 01B08R2 AbM CDR1 | GLTRSDYAMG | 693 |
| 01B08R2 AbM CDR2 | TLKWSEGSRFMY | 694 |
| 01B08R2 AbM CDR3 | GFNVGFVRRASEYNF | 695 |
| 01B08R2 Kabat CDR1 | DYAMG | 696 |
| 01B08R2 Kabat CDR2 | TLKWSEGSRFMYRAEDVKG | 697 |
| 01B08R2 Kabat CDR3 | GFNVGFVRRASEYNF | 698 |
| 01B08R2 Chothia CDR1 | GLTRSDY | 699 |
| 01B08R2 Chothia CDR2 | KWSEGSRF | 700 |
| 01B08R2 Chothia CDR3 | GFNVGFVRRASEYN | 701 |
| 01B08R2 IMGT CDR1 | GLTRSDYA | 702 |
| 01B08R2 IMGT CDR2 | LKWSEGSRFM | 703 |
| 01B08R2 IMGT CDR3 | AAGFNVGFVRRASEYNF | 704 |
| 01B08R2 Contact CDR1 | SDYAMG | 705 |
| 01B08R2 Contact CDR2 | FVATLKWSEGSRFMY | 706 |
| 01B08R2 Contact CDR3 | AAGFNVGFVRRASEYN | 707 |
| 01C02R3 AbM CDR1 | GLSFSSYTMG | 708 |
| 01C02R3 AbM CDR2 | AIHWSGGPTF | 709 |
| 01C02R3 AbM CDR3 | EPVGSMISPDWTY | 710 |
| 01C02R3 Kabat CDR1 | SYTMG | 711 |
| 01C02R3 Kabat CDR2 | AIHWSGGPTFYSNSVKG | 712 |
| 01C02R3 Kabat CDR3 | EPVGSMISPDWTY | 713 |
| 01C02R3 Chothia CDR1 | GLSFSSY | 714 |
| 01C02R3 Chothia CDR2 | HWSGGP | 715 |
| 01C02R3 Chothia CDR3 | EPVGSMISPDWT | 716 |
| 01C02R3 IMGT CDR1 | GLSFSSYT | 717 |
| 01C02R3 IMGT CDR2 | IHWSGGPT | 718 |
| 01C02R3 IMGT CDR3 | TAEPVGSMISPDWTY | 719 |
| 01C02R3 Contact CDR1 | SSYTMG | 720 |
| 01C02R3 Contact CDR2 | LISAIHWSGGPTF | 721 |
| 01C02R3 Contact CDR3 | TAEPVGSMISPDWT | 722 |
| 02B09R3 AbM CDR1 | GFTFRTYYMG | 723 |
| 02B09R3 AbM CDR2 | VTRSSDDVTY | 724 |
| 02B09R3 AbM CDR3 | KPVPITRYSFPQIGEEYDY | 725 |
| 02B09R3 Kabat CDR1 | TYYMG | 726 |
| 02B09R3 Kabat CDR2 | VTRSSDDVTYYADSVKG | 727 |
| 02B09R3 Kabat CDR3 | KPVPITRYSFPQIGEEYDY | 728 |
| 02B09R3 Chothia CDR1 | GFTFRTY | 729 |
| 02B09R3 Chothia CDR2 | RSSDDV | 730 |
| 02B09R3 Chothia CDR3 | KPVPITRYSFPQIGEEYD | 731 |
| 02B09R3 IMGT CDR1 | GFTFRTYY | 732 |
| 02B09R3 IMGT CDR2 | TRSSDDVT | 733 |
| 02B09R3 IMGT CDR3 | AAKPVPITRYSFPQI | 734 |
| | GEEYDY | |
| 02B09R3 Contact CDR1 | RTYYMG | 735 |
| 02B09R3 Contact CDR2 | FVGVTRSSDDVTY | 736 |
| 02B09R3 Contact CDR3 | AAKPVPITRYSFPQI | 737 |
| | GEEYD | |
| 03H05R3 AbM CDR1 | GRSLSFDTYAMS | 738 |
| 03H05R3 AbM CDR2 | SIDWNGGSTS | 739 |
| 03H05R3 AbM CDR3 | ARYYIGGTYFPANY | 740 |
| 03H05R3 Kabat CDR1 | FDTYAMS | 741 |
| 03H05R3 Kabat CDR2 | SIDWNGGSTSYADSMKG | 742 |
| 03H05R3 Kabat CDR3 | ARYYIGGTYFPANY | 743 |
| 03H05R3 Chothia CDR1 | GRSLSFDTY | 744 |
| 03H05R3 Chothia CDR2 | DWNGGS | 745 |
| 03H05R3 Chothia CDR3 | ARYYIGGTYFPAN | 746 |
| 03H05R3 IMGT CDR1 | GRSLSFDTYA | 747 |
| 03H05R3 IMGT CDR2 | IDWNGGST | 748 |
| 03H05R3 IMGT CDR3 | ASARYYIGGTYFPANY | 749 |
| 03H05R3 Contact CDR1 | SFDTYAMS | 750 |
| 03H05R3 Contact CDR2 | FVASIDWNGGSTS | 751 |
| 03H05R3 Contact CDR3 | ASARYYIGGTYFPAN | 752 |
| 01F08R3LS AbM CDR1 | GRAFSTYAMG | 753 |
| 01F08R3LS AbM CDR2 | GIAWSGYSTD | 754 |
| 01F08R3LS AbM CDR3 | ERNFGRVGVKEVEYDY | 755 |
| 01F08R3LS Kabat CDR1 | TYAMG | 756 |
| 01F08R3LS Kabat CDR2 | GIAWSGYSTDYADSVKG | 757 |
| 01F08R3LS Kabat CDR3 | ERNFGRVGVKEVEYDY | 758 |
| 01F08R3LS Chothia CDR1 | GRAFSTY | 759 |
| 01F08R3LS Chothia CDR2 | AWSGYS | 760 |
| 01F08R3LS Chothia CDR3 | ERNFGRVGVKEVEYD | 761 |
| 01F08R3LS IMGT CDR1 | GRAFSTYA | 762 |
| 01F08R3LS IMGT CDR2 | IAWSGYST | 763 |
| 01F08R3LS IMGT CDR3 | AGERNFGRVGVKEVEYDY | 764 |
| 01F08R3LS Contact CDR1 | STYAMG | 765 |
| 01F08R3LS Contact CDR2 | FVAGIAWSGYSTD | 766 |
| 01F08R3LS Contact CDR3 | AGERNFGRVGVKEVEYD | 767 |
| 02D06R3 AbM CDR1 | GSIFSIRDMA | 768 |
| 02D06R3 AbM CDR2 | IAARGGSTH | 769 |
| 02D06R3 AbM CDR3 | EVATMIQPGFRDY | 770 |
| 02D06R3 Kabat CDR1 | IRDMA | 771 |
| 02D06R3 Kabat CDR2 | IAARGGSTHYADSVKG | 772 |
| 02D06R3 Kabat CDR3 | EVATMIQPGFRDY | 773 |
| 02D06R3 Chothia CDR1 | GSIFSIR | 774 |
| 02D06R3 Chothia CDR2 | ARGGS | 775 |
| 02D06R3 Chothia CDR3 | EVATMIQPGFRD | 776 |
| 02D06R3 IMGT CDR1 | GSIFSIRD | 777 |
| 02D06R3 IMGT CDR2 | AARGGST | 778 |
| 02D06R3 IMGT CDR3 | NAEVATMIQPGFRDY | 779 |
| 02D06R3 Contact CDR1 | SIRDMA | 780 |
| 02D06R3 Contact CDR2 | WVAIAARGGSTH | 781 |
| 02D06R3 Contact CDR3 | NAEVATMIQPGFRD | 782 |
| 01B11R3LS AbM CDR1 | GLPFSSSRMG | 783 |
| 01B11R3LS AbM CDR2 | AIGWSGRSTYRY | 784 |
| 01B11R3LS AbM CDR3 | DPDYYGDYRTSGAWRY | 785 |
| 01B11R3LS Kabat CDR1 | SSRMG | 786 |
| 01B11R3LS Kabat CDR2 | AIGWSGRSTYRYYGDSVKG | 787 |
| 01B11R3LS Kabat CDR3 | DPDYYGDYRTSGAWRY | 788 |
| 01B11R3LS Chothia CDR1 | GLPFSSS | 789 |
| 01B11R3LS Chothia CDR2 | GWSGRSTY | 790 |
| 01B11R3LS Chothia CDR3 | DPDYYGDYRTSGAWR | 791 |
| 01B11R3LS IMGT CDR1 | GLPFSSSR | 792 |
| 01B11R3LS IMGT CDR2 | IGWSGRSTYR | 793 |
| 01B11R3LS IMGT CDR3 | AADPDYYGDYRTSGAWRY | 794 |
| 01B11R3LS Contact CDR1 | SSSRMG | 795 |
| 01B11R3LS Contact CDR2 | FVAAIGWSGRSTYRY | 796 |
| 01B11R3LS Contact CDR3 | AADPDYYGDYRTSGAWR | 797 |
| 01G09R3LS AbM CDR1 | GRTFPTYAMG | 798 |
| 01G09R3LS AbM CDR2 | TIRWSGSTQYKY | 799 |
| 01G09R3LS AbM CDR3 | TTLLTDPRALNAYAY | 800 |
| 01G09R3LS Kabat CDR1 | TYAMG | 801 |
| 01G09R3LS Kabat CDR2 | TIRWSGSTQYKYYADFVKG | 802 |
| 01G09R3LS Kabat CDR3 | TTLLTDPRALNAYAY | 803 |
| 01G09R3LS Chothia CDR1 | GRTFPTY | 804 |
| 01G09R3LS Chothia CDR2 | RWSGSTQY | 805 |
| 01G09R3LS Chothia CDR3 | TTLLTDPRALNAYA | 806 |
| 01G09R3LS IMGT CDR1 | GRTFPTYA | 807 |
| 01G09R3LS IMGT CDR2 | IRWSGSTQYK | 808 |
| 01G09R3LS IMGT CDR3 | AATTLLTDPRALNAYAY | 809 |
| 01G09R3LS Contact CDR1 | PTYAMG | 810 |
| 01G09R3LS Contact CDR2 | FVATIRWSGSTQYKY | 811 |
| 01G09R3LS Contact CDR3 | AATTLLTDPRALNAYA | 812 |
| 01D09R3 AbM CDR1 | GRTFSVYAMG | 813 |
| 01D09R3 AbM CDR2 | AITWSGGSTS | 814 |
| 01D09R3 AbM CDR3 | ATNPYFSDYYPDLKYEFDY | 815 |
| 01D09R3 Kabat CDR1 | VYAMG | 816 |
| 01D09R3 Kabat CDR2 | AITWSGGSTSYADSVKG | 817 |
| 01D09R3 Kabat CDR3 | ATNPYFSDYYPDLKYEFDY | 818 |
| 01D09R3 Chothia CDR1 | GRTFSVY | 819 |
| 01D09R3 Chothia CDR2 | TWSGGS | 820 |
| 01D09R3 Chothia CDR3 | ATNPYFSDYYPDLKYEFD | 821 |
| 01D09R3 IMGT CDR1 | GRTFSVYA | 822 |
| 01D09R3 IMGT CDR2 | ITWSGGST | 823 |
| 01D09R3 IMGT CDR3 | AAATNPYFSDYYPDLK | 824 |
| | YEFDY | |
| 01D09R3 Contact CDR1 | SVYAMG | 825 |
| 01D09R3 Contact CDR2 | FVAAITWSGGSTS | 826 |
| 01D09R3 Contact CDR3 | AAATNPYFSDYYPDL | 827 |
| | KYEFD | |
| 01F03R3LS AbM CDR1 | GRTINGYVMG | 828 |
| 01F03R3LS AbM CDR2 | RIDWSGSSTD | 829 |
| 01F03R3LS AbM CDR3 | SAYYSGYVTHRDFGS | 830 |
| 01F03R3LS Kabat CDR1 | GYVMG | 831 |
| 01F03R3LS Kabat CDR2 | RIDWSGSSTDYADSVKG | 832 |
| 01F03R3LS Kabat CDR3 | SAYYSGYVTHRDFGS | 833 |
| 01F03R3LS Chothia CDR1 | GRTINGY | 834 |
| 01F03R3LS Chothia CDR2 | DWSGSS | 835 |
| 01F03R3LS Chothia CDR3 | SAYYSGYVTHRDFG | 836 |
| 01F03R3LS IMGT CDR1 | GRTINGYV | 837 |
| 01F03R3LS IMGT CDR2 | IDWSGSST | 838 |
| 01F03R3LS IMGT CDR3 | AGSAYYSGYVTHRDFGS | 839 |
| 01F03R3LS Contact CDR1 | NGYVMG | 840 |
| 01F03R3LS Contact CDR2 | FVARIDWSGSSTD | 841 |
| 01F03R3LS Contact CDR3 | AGSAYYSGYVTHRDFG | 842 |
| 02C10R3 AbM CDR1 | GFTFSSFTMT | 843 |
| 02C10R3 AbM CDR2 | RISSDGTGTN | 844 |
| 02C10R3 AbM CDR3 | ADDSST | 845 |
| 02C10R3 Kabat CDR1 | SFTMT | 846 |
| 02C10R3 Kabat CDR2 | RISSDGTGTNYADSVKG | 847 |
| 02C10R3 Kabat CDR3 | ADDSST | 848 |
| 02C10R3 Chothia CDR1 | GFTFSSF | 849 |
| 02C10R3 Chothia CDR2 | SSDGTG | 850 |
| 02C10R3 Chothia CDR3 | ADDSS | 851 |
| 02C10R3 IMGT CDR1 | GFTFSSFT | 852 |
| 02C10R3 IMGT CDR2 | ISSDGTGT | 853 |
| 02C10R3 IMGT CDR3 | AIADDSST | 854 |
| 02C10R3 Contact CDR1 | SSFTMT | 855 |
| 02C10R3 Contact CDR2 | WVSRISSDGTGTN | 856 |
| 02C10R3 Contact CDR3 | AIADDSS | 857 |
| 01E03R3 AbM CDR1 | GRTFSVYRVG | 858 |
| 01E03R3 AbM CDR2 | AVIWSGASTYKY | 859 |
| 01E03R3 AbM CDR3 | DPLGLPGPDVRVEGGYRH | 860 |
| 01E03R3 Kabat CDR1 | VYRVG | 861 |
| 01E03R3 Kabat CDR2 | AVIWSGASTYKYAADSVKG | 862 |
| 01E03R3 Kabat CDR3 | DPLGLPGPDVRVEGGYRH | 863 |
| 01E03R3 Chothia CDR1 | GRTFSVY | 864 |
| 01E03R3 Chothia CDR2 | IWSGASTY | 865 |
| 01E03R3 Chothia CDR3 | DPLGLPGPDVRVEGGYR | 866 |
| 01E03R3 IMGT CDR1 | GRTFSVYR | 867 |
| 01E03R3 IMGT CDR2 | VIWSGASTYK | 868 |
| 01E03R3 IMGT CDR3 | AADPLGLPGPDVRVEGGYRH | 869 |
| 01E03R3 Contact CDR1 | SVYRVG | 870 |
| 01E03R3 Contact CDR2 | FVAAVIWSGASTYKY | 871 |
| 01E03R3 Contact CDR3 | AADPLGLPGPDVRVEGGYR | 872 |
| 01C01R2LS AbM CDR1 | GRTVTVMTVG | 873 |
| 01C01R2LS AbM CDR2 | AITMYGERTY | 874 |
| 01C01R2LS AbM CDR3 | RTYVSGIYDRFDDYNY | 875 |
| 01C01R2LS Kabat CDR1 | VMTVG | 876 |
| 01C01R2LS Kabat CDR2 | AITMYGERTYYADSVKG | 877 |
| 01C01R2LS Kabat CDR3 | RTYVSGIYDRFDDYNY | 878 |
| 01C01R2LS Chothia CDR1 | GRTVTVM | 879 |
| 01C01R2LS Chothia CDR2 | TMYGER | 880 |
| 01C01R2LS Chothia CDR3 | RTYVSGIYDRFDDYN | 881 |
| 01C01R2LS IMGT CDR1 | GRTVTVMT | 882 |
| 01C01R2LS IMGT CDR2 | ITMYGERT | 883 |
| 01C01R2LS IMGT CDR3 | AARTYVSGIYDRFDDYNY | 884 |
| 01C01R2LS Contact CDR1 | TVMTVG | 885 |
| 01C01R2LS Contact CDR2 | FVAAITMYGERTY | 886 |
| 01C01R2LS Contact CDR3 | AARTYVSGIYDRFDDYN | 887 |
| 03G05R3 AbM CDR1 | GRALSFNTYAMA | 888 |
| 03G05R3 AbM CDR2 | SITYNGGSTY | 889 |
| 03G05R3 AbM CDR3 | AQYWRSGTSFPANY | 890 |
| 03G05R3 Kabat CDR1 | FNTYAMA | 891 |
| 03G05R3 Kabat CDR2 | SITYNGGSTYYADSVKG | 892 |
| 03G05R3 Kabat CDR3 | AQYWRSGTSFPANY | 893 |
| 03G05R3 Chothia CDR1 | GRALSFNTY | 894 |
| 03G05R3 Chothia CDR2 | TYNGGS | 895 |
| 03G05R3 Chothia CDR3 | AQYWRSGTSFPAN | 896 |
| 03G05R3 IMGT CDR1 | GRALSFNTYA | 897 |
| 03G05R3 IMGT CDR2 | ITYNGGST | 898 |
| 03G05R3 IMGT CDR3 | ASAQYWRSGTSFPANY | 899 |
| 03G05R3 Contact CDR1 | SFNTYAMA | 900 |
| 03G05R3 Contact CDR2 | FVASITYNGGSTY | 901 |
| 03G05R3 Contact CDR3 | ASAQYWRSGTSFPAN | 902 |
| 01B04R3L AbM CDR1 | GRTFTTYVMG | 903 |
| 01B04R3L AbM CDR2 | TIAWSGSTNYKY | 904 |
| 01B04R3L AbM CDR3 | STVLTDPRRLNEYAN | 905 |
| 01B04R3L Kabat CDR1 | TYVMG | 906 |
| 01B04R3L Kabat CDR2 | TIAWSGSTNYKYYADSVKG | 907 |
| 01B04R3L Kabat CDR3 | STVLTDPRRLNEYAN | 908 |
| 01B04R3L Chothia CDR1 | GRTFTTY | 909 |
| 01B04R3L Chothia CDR2 | AWSGSTNY | 910 |
| 01B04R3L Chothia CDR3 | STVLTDPRRLNEYA | 911 |
| 01B04R3L IMGT CDR1 | GRTFTTYV | 912 |
| 01B04R3L IMGT CDR2 | IAWSGSTNYK | 913 |
| 01B04R3L IMGT CDR3 | AASTVLTDPRRLNEYAN | 914 |
| 01B04R3L Contact CDR1 | TTYVMG | 915 |
| 01B04R3L Contact CDR2 | FVATIAWSGSTNYKY | 916 |
| 01B04R3L Contact CDR3 | AASTVLTDPRRLNEYA | 917 |
| 02H11R3 AbM CDR1 | GRTFSNYAMG | 918 |
| 02H11R3 AbM CDR2 | GISRSGGSTY | 919 |
| 02H11R3 AbM CDR3 | DGLDYALGFRGDY | 920 |
| 02H11R3 Kabat CDR1 | NYAMG | 921 |
| 02H11R3 Kabat CDR2 | GISRSGGSTYSADSVKG | 922 |
| 02H11R3 Kabat CDR3 | DGLDYALGFRGDY | 923 |
| 02H11R3 Chothia CDR1 | GRTFSNY | 924 |
| 02H11R3 Chothia CDR2 | SRSGGS | 925 |
| 02H11R3 Chothia CDR3 | DGLDYALGFRGD | 926 |
| 02H11R3 IMGT CDR1 | GRTFSNYA | 927 |
| 02H11R3 IMGT CDR2 | ISRSGGST | 928 |
| 02H11R3 IMGT CDR3 | AADGLDYALGFRGDY | 929 |
| 02H11R3 Contact CDR1 | SNYAMG | 930 |
| 02H11R3 Contact CDR2 | FVAGISRSGGSTY | 931 |
| 02H11R3 Contact CDR3 | AADGLDYALGFRGD | 932 |
| 01C12R2 AbM CDR1 | GRTFGSYSMG | 933 |
| 01C12R2 AbM CDR2 | AISWSGSSTYKY | 934 |
| 01C12R2 AbM CDR3 | TMERRDPRRTSAYDY | 935 |
| 01C12R2 Kabat CDR1 | SYSMG | 936 |
| 01C12R2 Kabat CDR2 | AISWSGSSTYKYYEDSVKG | 937 |
| 01C12R2 Kabat CDR3 | TMERRDPRRTSAYDY | 938 |
| 01C12R2 Chothia CDR1 | GRTFGSY | 939 |
| 01C12R2 Chothia CDR2 | SWSGSSTY | 940 |
| 01C12R2 Chothia CDR3 | TMERRDPRRTSAYD | 941 |
| 01C12R2 IMGT CDR1 | GRTFGSYS | 942 |
| 01C12R2 IMGT CDR2 | ISWSGSSTYK | 943 |
| 01C12R2 IMGT CDR3 | GGTMERRDPRRTSAYDY | 944 |
| 01C12R2 Contact CDR1 | GSYSMG | 945 |
| 01C12R2 Contact CDR2 | FVGAISWSGSSTYKY | 946 |
| 01C12R2 Contact CDR3 | GGTMERRDPRRTSAYD | 947 |
| 01C11R2 AbM CDR1 | GRTFSTYRMG | 948 |
| 01C11R2 AbM CDR2 | AISWSTGSTY | 949 |
| 01C11R2 AbM CDR3 | GMVATTRSSAYPY | 950 |
| 01C11R2 Kabat CDR1 | TYRMG | 951 |
| 01C11R2 Kabat CDR2 | AISWSTGSTYYADSVKG | 952 |
| 01C11R2 Kabat CDR3 | GMVATTRSSAYPY | 953 |
| 01C11R2 Chothia CDR1 | GRTFSTY | 954 |
| 01C11R2 Chothia CDR2 | SWSTGS | 955 |
| 01C11R2 Chothia CDR3 | GMVATTRSSAYP | 956 |
| 01C11R2 IMGT CDR1 | GRTFSTYR | 957 |
| 01C11R2 IMGT CDR2 | ISWSTGST | 958 |
| 01C11R2 IMGT CDR3 | AAGMVATTRSSAYPY | 959 |
| 01C11R2 Contact CDR1 | STYRMG | 960 |
| 01C11R2 Contact CDR2 | FVAAISWSTGSTY | 961 |
| 01C11R2 Contact CDR3 | AAGMVATTRSSAYP | 962 |
| 01E02R3LS AbM CDR1 | GRTESTYTMA | 963 |
| 01E02R3LS AbM CDR2 | TISFSGSTTT | 964 |
| 01E02R3LS AbM CDR3 | DTRRRVGSSPRFYDY | 965 |
| 01E02R3LS Kabat CDR1 | TYTMA | 966 |
| 01E02R3LS Kabat CDR2 | TISFSGSTTTYLASVQG | 967 |
| 01E02R3LS Kabat CDR3 | DTRRRVGSSPRFYDY | 968 |
| 01E02R3LS Chothia CDR1 | GRTESTY | 969 |
| 01E02R3LS Chothia CDR2 | SFSGST | 970 |
| 01E02R3LS Chothia CDR3 | DTRRRVGSSPRFYD | 971 |
| 01E02R3LS IMGT CDR1 | GR1ESTYT | 972 |
| 01E02R3LS IMGT CDR2 | ISFSGSTT | 973 |
| 01E02R3LS IMGT CDR3 | ALDTRRRVGSSPRFYDY | 974 |
| 01E02R3LS Contact CDR1 | STYTMA | 975 |
| 01E02R3LS Contact CDR2 | RVATISFSGSTTT | 976 |
| 01E02R3LS Contact CDR3 | ALDTRRRVGSSPRFYD | 977 |
| 02E01R3LS AbM CDR1 | GRTFTTYGMG | 978 |
| 02E01R3LS AbM CDR2 | TITWSGSTNYKY | 979 |
| 02E01R3LS AbM CDR3 | STVLRDPRVP1EYDY | 980 |
| 02E01R3LS Kabat CDR1 | TYGMG | 981 |
| 02E01R3LS Kabat CDR2 | TITWSGSTNYKYYADSVKG | 982 |
| 02E01R3LS Kabat CDR3 | STVLRDPRVP1EYDY | 983 |
| 02E01R3LS Chothia CDR1 | GRTFTTY | 984 |
| 02E01R3LS Chothia CDR2 | TWSGSTNY | 985 |
| 02E01R3LS Chothia CDR3 | STVLRDPRVPTEYD | 986 |
| 02E01R3LS IMGT CDR1 | GRTFTTYG | 987 |
| 02E01R3LS IMGT CDR2 | ITWSGSTNYK | 988 |
| 02E01R3LS IMGT CDR3 | AASTVLRDPRVPTEYDY | 989 |
| 02E01R3LS Contact CDR1 | TTYGMG | 990 |
| 02E01R3LS Contact CDR2 | FVTTITWSGSTNYKY | 991 |
| 02E01R3LS Contact CDR3 | AASTVLRDPRVPTEYD | 992 |
| 01H05R3 AbM CDR1 | GRSLGFDTYGMA | 993 |
| 01H05R3 AbM CDR2 | SIDWNGGSTY | 994 |
| 01H05R3 AbM CDR3 | ARYYTSSTYFPANY | 995 |
| 01H05R3 Kabat CDR1 | FDTYGMA | 996 |
| 01H05R3 Kabat CDR2 | SIDWNGGSTYYADSMKG | 997 |
| 01H05R3 Kabat CDR3 | ARYYTSSTYFPANY | 998 |
| 01H05R3 Chothia CDR1 | GRSLGFDTY | 999 |
| 01H05R3 Chothia CDR2 | DWNGGS | 1000 |
| 01H05R3 Chothia CDR3 | ARYYTSSTYFPAN | 1001 |
| 01H05R3 IMGT CDR1 | GRSLGFDTYG | 1002 |
| 01H05R3 IMGT CDR2 | IDWNGGST | 1003 |
| 01H05R3 IMGT CDR3 | AAARYYTSSTYFPANY | 1004 |
| 01H05R3 Contact CDR1 | GFDTYGMA | 1005 |
| 01H05R3 Contact CDR2 | FVASIDWNGGSTY | 1006 |
| 01H05R3 Contact CDR3 | AAARYYTSSTYFPAN | 1007 |
| 03C05R3 AbM CDR1 | TSIASINVMG | 1008 |
| 03C05R3 AbM CDR2 | RISGGGITH | 1009 |
| 03C05R3 AbM CDR3 | DVFASSGHVTTY | 1010 |
| 03C05R3 Kabat CDR1 | INVMG | 1011 |
| 03C05R3 Kabat CDR2 | RISGGGITHYAESVEG | 1012 |
| 03C05R3 Kabat CDR3 | DVFASSGHVTTY | 1013 |
| 03C05R3 Chothia CDR1 | TSIASIN | 1014 |
| 03C05R3 Chothia CDR2 | SGGGI | 1015 |
| 03C05R3 Chothia CDR3 | DVFASSGHVTT | 1016 |
| 03C05R3 IMGT CDR1 | TSIASINV | 1017 |
| 03C05R3 IMGT CDR2 | ISGGGIT | 1018 |
| 03C05R3 IMGT CDR3 | KADVFASSGHVTTY | 1019 |
| 03C05R3 Contact CDR1 | SINVMG | 1020 |
| 03C05R3 Contact CDR2 | LVARISGGGITH | 1021 |
| 03C05R3 Contact CDR3 | KADVFASSGHVTT | 1022 |
| 01A09R3LS AbM CDR1 | GRSFSSYNMV | 1023 |
| 01A09R3LS AbM CDR2 | AVTWSGGGTS | 1024 |
| 01A09R3LS AbM CDR3 | TQDWYGGSRAFRAASFHS | 1025 |
| 01A09R3LS Kabat CDR1 | SYNMV | 1026 |
| 01A09R3LS Kabat CDR2 | AVTWSGGGTSYADSVKG | 1027 |
| 01A09R3LS Kabat CDR3 | TQDWYGGSRAFRAASFHS | 1028 |
| 01A09R3LS Chothia CDR1 | GRSFSSY | 1029 |
| 01A09R3LS Chothia CDR2 | TWSGGG | 1030 |
| 01A09R3LS Chothia CDR3 | TQDWYGGSRAFRAASFH | 1031 |
| 01A09R3LS IMGT CDR1 | GRSFSSYN | 1032 |
| 01A09R3LS IMGT CDR2 | VTWSGGGT | 1033 |
| 01A09R3LS IMGT CDR3 | AATQDWYGGSRAFR | 1034 |
| | AASFHS | |
| 01A09R3LS Contact CDR1 | SSYNMV | 1035 |
| 01A09R3LS Contact CDR2 | VVAAVTWSGGGTS | 1036 |
| 01A09R3LS Contact CDR3 | AATQDWYGGSRAFR | 1037 |
| | AASFH | |
| 01B10R3L AbM CDR1 | GRTFTTYVMG | 1038 |
| 01B10R3L AbM CDR2 | TISWSGSTTYKY | 1039 |
| 01B10R3L AbM CDR3 | STVVADPRAPNEYDY | 1040 |
| 01B10R3L Kabat CDR1 | TYVMG | 1041 |
| 01B10R3L Kabat CDR2 | TISWSGSTTYKYYADSVKG | 1042 |
| 01B10R3L Kabat CDR3 | STVVADPRAPNEYDY | 1043 |
| 01B10R3L Chothia CDR1 | GRTFTTY | 1044 |
| 01B10R3L Chothia CDR2 | SWSGSTTY | 1045 |
| 01B10R3L Chothia CDR3 | STVVADPRAPNEYD | 1046 |
| 01B10R3L IMGT CDR1 | GRTFTTYV | 1047 |
| 01B10R3L IMGT CDR2 | ISWSGSTTYK | 1048 |
| 01B10R3L IMGT CDR3 | AASTVVADPRAPNEYDY | 1049 |
| 01B10R3L Contact CDR1 | TTYVMG | 1050 |
| 01B10R3L Contact CDR2 | FVATISWSGSTTYKY | 1051 |
| 01B10R3L Contact CDR3 | AASTVVADPRAPNEYD | 1052 |
| 01H02R3LS AbM CDR1 | GSIFSASVMG | 1053 |
| 01H02R3LS AbM CDR2 | RISPGGVTH | 1054 |
| 01H02R3LS AbM CDR3 | DRFGFEVY | 1055 |
| 01H02R3LS Kabat CDR1 | ASVMG | 1056 |
| 01H02R3LS Kabat CDR2 | RISPGGVTHYADSVKG | 1057 |
| 01H02R3LS Kabat CDR3 | DRFGFEVY | 1058 |
| 01H02R3LS Chothia CDR1 | GSIFSAS | 1059 |
| 01H02R3LS Chothia CDR2 | SPGGV | 1060 |
| 01H02R3LS Chothia CDR3 | DRFGFEV | 1061 |
| 01H02R3LS IMGT CDR1 | GSIFSASV | 1062 |
| 01H02R3LS IMGT CDR2 | ISPGGVT | 1063 |
| 01H02R3LS IMGT CDR3 | NADRFGFEVY | 1064 |
| 01H02R3LS Contact CDR1 | SASVMG | 1065 |
| 01H02R3LS Contact CDR2 | FVARISPGGVTH | 1066 |
| 01H02R3LS Contact CDR3 | NADRFGFEV | 1067 |
| 01C03R3L AbM CDR1 | GSIFSIRDMG | 1068 |
| 01C03R3L AbM CDR2 | IFARGGSTH | 1069 |
| 01C03R3L AbM CDR3 | EVATMIQPGFRDY | 1070 |
| 01C03R3L Kabat CDR1 | IRDMG | 1071 |
| 01C03R3L Kabat CDR2 | IFARGGSTHYADSVKG | 1072 |
| 01C03R3L Kabat CDR3 | EVATMIQPGFRDY | 1073 |
| 01C03R3L Chothia CDR1 | GSIFSIR | 1074 |
| 01C03R3L Chothia CDR2 | ARGGS | 1075 |
| 01C03R3L Chothia CDR3 | EVATMIQPGFRD | 1076 |
| 01C03R3L IMGT CDR1 | GSIFSIRD | 1077 |
| 01C03R3L IMGT CDR2 | FARGGST | 1078 |
| 01C03R3L IMGT CDR3 | NAEVATMIQPGFRDY | 1079 |
| 01C03R3L Contact CDR1 | SIRDMG | 1080 |
| 01C03R3L Contact CDR2 | LVAIFARGGSTH | 1081 |
| 01C03R3L Contact CDR3 | NAEVATMIQPGFRD | 1082 |
| 01D04R3LS AbM CDR1 | GRTFRSYAMG | 1083 |
| 01D04R3LS AbM CDR2 | DISWRGGRLY | 1084 |
| 01D04R3LS AbM CDR3 | TGDQPAFTTAQGMGAM | 1085 |
| | LEYDY | |
| 01D04R3LS Kabat CDR1 | SYAMG | 1086 |
| 01D04R3LS Kabat CDR2 | DISWRGGRLYYADSVKG | 1087 |
| 01D04R3LS Kabat CDR3 | TGDQPAFTTAQGMGAM | 1088 |
| | LEYDY | |
| 01D04R3LS Chothia CDR1 | GRTFRSY | 1089 |
| 01D04R3LS Chothia CDR2 | SWRGGR | 1090 |
| 01D04R3LS Chothia CDR3 | TGDQPAFTTAQGMGA | 1091 |
| | MLEYD | |
| 01D04R3LS IMGT CDR1 | GRTFRSYA | 1092 |
| 01D04R3LS IMGT CDR2 | ISWRGGRL | 1093 |
| 01D04R3LS IMGT CDR3 | AATGDQPAFTTAQGM | 1094 |
| | GAMLEYDY | |
| 01D04R3LS Contact CDR1 | RSYAMG | 1095 |
| 01D04R3LS Contact CDR2 | FVADISWRGGRLY | 1096 |
| 01D04R3LS Contact CDR3 | AATGDQPAFTTAQ | 1097 |
| | GMGAMLEYD | |
| 01B03R2LS AbM CDR1 | GRTGSSGAMG | 1098 |
| 01B03R2LS AbM CDR2 | ALMWRNTVTYSY | 1099 |
| 01B03R2LS AbM CDR3 | DPDTYGDPRNSGAYSY | 1100 |
| 01B03R2LS Kabat CDR1 | SGAMG | 1101 |
| 01B03R2LS Kabat CDR2 | ALMWRNTVTYSYYADSVKG | 1102 |
| 01B03R2LS Kabat CDR3 | DPDTYGDPRNSGAYSY | 1103 |
| 01B03R2LS Chothia CDR1 | GRTGSSG | 1104 |
| 01B03R2LS Chothia CDR2 | MWRNTVTY | 1105 |
| 01B03R2LS Chothia CDR3 | DPDTYGDPRNSGAYS | 1106 |
| 01B03R2LS IMGT CDR1 | GRTGSSGA | 1107 |
| 01B03R2LS IMGT CDR2 | LMWRNTVTYS | 1108 |
| 01B03R2LS IMGT CDR3 | AADPDTYGDPRNSGAYSY | 1109 |
| 01B03R2LS Contact CDR1 | SSGAMG | 1110 |
| 01B03R2LS Contact CDR2 | FVAALMWRNTVTYSY | 1111 |
| 01B03R2LS Contact CDR3 | AADPDTYGDPRNSGAYS | 1112 |
| 03F01R3 AbM CDR1 | GDVFDIGTMA | 1113 |
| 03F01R3 AbM CDR2 | SITMGGSTD | 1114 |
| 03F01R3 AbM CDR3 | QFFWPKRHDY | 1115 |
| 03F01R3 Kabat CDR1 | IGTMA | 1116 |
| 03F01R3 Kabat CDR2 | SITMGGSTDVADSAKG | 1117 |
| 03F01R3 Kabat CDR3 | QFFWPKRHDY | 1118 |
| 03F01R3 Chothia CDR1 | GDVFDIG | 1119 |
| 03F01R3 Chothia CDR2 | TMGGS | 1120 |
| 03F01R3 Chothia CDR3 | QFFWPKRHD | 1121 |
| 03F01R3 IMGT CDR1 | GDVFDIGT | 1122 |
| 03F01R3 IMGT CDR2 | ITMGGST | 1123 |
| 03F01R3 IMGT CDR3 | NAQFFWPKRHDY | 1124 |
| 03F01R3 Contact CDR1 | DIGTMA | 1125 |
| 03F01R3 Contact CDR2 | LVASITMGGSTD | 1126 |
| 03F01R3 Contact CDR3 | NAQFFWPKRHD | 1127 |
| 01A04R3LS AbM CDR1 | GIDVSISTIM | 1128 |
| 01A04R3LS AbM CDR2 | DVIPSGRSTT | 1129 |
| 01A04R3LS AbM CDR3 | FVRRENY | 1130 |
| 01A04R3LS Kabat CDR1 | ISTIM | 1131 |
| 01A04R3LS Kabat CDR2 | DVIPSGRSTTYTESVKG | 1132 |
| 01A04R3LS Kabat CDR3 | FVRRENY | 1133 |
| 01A04R3LS Chothia CDR1 | GIDVSIS | 1134 |
| 01A04R3LS Chothia CDR2 | IPSGRS | 1135 |
| 01A04R3LS Chothia CDR3 | FVRREN | 1136 |
| 01A04R3LS IMGT CDR1 | GIDVSIST | 1137 |
| 01A04R3LS IMGT CDR2 | VIPSGRST | 1138 |
| 01A04R3LS IMGT CDR3 | NAFVRRENY | 1139 |
| 01A04R3LS Contact CDR1 | SISTIM | 1140 |
| 01A04R3LS Contact CDR2 | LVADVIPSGRSTT | 1141 |
| 01A04R3LS Contact CDR3 | NAFVRREN | 1142 |
| 01F03R2LS AbM CDR1 | GRTGSSGAMG | 1143 |
| 01F03R2LS AbM CDR2 | ALMWRNTVTYKY | 1144 |
| 01F03R2LS AbM CDR3 | DPDTYGDPRNSGAYDY | 1145 |
| 01F03R2LS Kabat CDR1 | SGAMG | 1146 |
| 01F03R2LS Kabat CDR2 | ALMWRNTVTYKYYED | 1147 |
| | SVKG | |
| 01F03R2LS Kabat CDR3 | DPDTYGDPRNSGAYDY | 1148 |
| 01F03R2LS Chothia CDR1 | GRTGSSG | 1149 |
| 01F03R2LS Chothia CDR2 | MWRNTVTY | 1150 |
| 01F03R2LS Chothia CDR3 | DPDTYGDPRNSGAYD | 1151 |
| 01F03R2LS IMGT CDR1 | GRTGSSGA | 1152 |
| 01F03R2LS IMGT CDR2 | LMWRNTVTYK | 1153 |
| 01F03R2LS IMGT CDR3 | AADPDTYGDPRNSGAYDY | 1154 |
| 01F03R2LS Contact CDR1 | SSGAMG | 1155 |
| 01F03R2LS Contact CDR2 | FVAALMWRNTVTYKY | 1156 |
| 01F03R2LS Contact CDR3 | AADPDTYGDPRNSGAYD | 1157 |
| 03G07R3 AbM CDR1 | GRTLSFDTYAMA | 1158 |
| 03G07R3 AbM CDR2 | SIDYNGGSTD | 1159 |
| 03G07R3 AbM CDR3 | ARYYRSGTSFPVNY | 1160 |
| 03G07R3 Kabat CDR1 | FDTYAMA | 1161 |
| 03G07R3 Kabat CDR2 | SIDYNGGSTDYADSVKG | 1162 |
| 03G07R3 Kabat CDR3 | ARYYRSGTSFPVNY | 1163 |
| 03G07R3 Chothia CDR1 | GRTLSFDTY | 1164 |
| 03G07R3 Chothia CDR2 | DYNGGS | 1165 |
| 03G07R3 Chothia CDR3 | ARYYRSGTSFPVN | 1166 |
| 03G07R3 IMGT CDR1 | GRTLSFDTYA | 1167 |
| 03G07R3 IMGT CDR2 | IDYNGGST | 1168 |
| 03G07R3 IMGT CDR3 | ASARYYRSGTSFPVNY | 1169 |
| 03G07R3 Contact CDR1 | SFDTYAMA | 1170 |
| 03G07R3 Contact CDR2 | FVASIDYNGGSTD | 1171 |
| 03G07R3 Contact CDR3 | ASARYYRSGTSFPVN | 1172 |
| 01B02R2L AbM CDR1 | GLTFSSYRMG | 1173 |
| 01B02R2L AbM CDR2 | AIDWNGRGTYYRY | 1174 |
| 01B02R2L AbM CDR3 | DSRTSIDPRTSGHYRY | 1175 |
| 01B02R2L Kabat CDR1 | SYRMG | 1176 |
| 01B02R2L Kabat CDR2 | AIDWNGRGTYYRYYAD | 1177 |
| | SVKG | |
| 01B02R2L Kabat CDR3 | DSRTSIDPRTSGHYRY | 1178 |
| 01B02R2L Chothia CDR1 | GLTFSSY | 1179 |
| 01B02R2L Chothia CDR2 | DWNGRGTYY | 1180 |
| 01B02R2L Chothia CDR3 | DSRTSIDPRTSGHYR | 1181 |
| 01B02R2L IMGT CDR1 | GLTFSSYR | 1182 |
| 01B02R2L IMGT CDR2 | IDWNGRGTYYR | 1183 |
| 01B02R2L IMGT CDR3 | AIDSRTSIDPRTSGHYRY | 1184 |
| 01B02R2L Contact CDR1 | SSYRMG | 1185 |
| 01B02R2L Contact CDR2 | FVAAIDWNGRGTYYRY | 1186 |
| 01B02R2L Contact CDR3 | AIDSRTSIDPRTSGHYR | 1187 |
| 01E04R3LS AbM CDR1 | GRTFTTYVMG | 1188 |
| 01E04R3LS AbM CDR2 | TITWSGSTNYKY | 1189 |
| 01E04R3LS AbM CDR3 | STVVTDPRKLNEYAY | 1190 |
| 01E04R3LS Kabat CDR1 | TYVMG | 1191 |
| 01E04R3LS Kabat CDR2 | TITWSGSTNYKYYADPVKG | 1192 |
| 01E04R3LS Kabat CDR3 | STVVTDPRKLNEYAY | 1193 |
| 01E04R3LS Chothia CDR1 | GRTFTTY | 1194 |
| 01E04R3LS Chothia CDR2 | TWSGSTNY | 1195 |
| 01E04R3LS Chothia CDR3 | STVVTDPRKLNEYA | 1196 |
| 01E04R3LS IMGT CDR1 | GRTFTTYV | 1197 |
| 01E04R3LS IMGT CDR2 | ITWSGSTNYK | 1198 |
| 01E04R3LS IMGT CDR3 | TSSTVVTDPRKLNEYAY | 1199 |
| 01E04R3LS Contact CDR1 | TTYVMG | 1200 |
| 01E04R3LS Contact CDR2 | FVATITWSGSTNYKY | 1201 |
| 01E04R3LS Contact CDR3 | TSSTVVTDPRKLNEYA | 1202 |
| 01F12R2 AbM CDR1 | GRTFSSYTMG | 1203 |
| 01F12R2 AbM CDR2 | AISWSSDGTYYKY | 1204 |
| 01F12R2 AbM CDR3 | SSSGTYGDPRSEREYRY | 1205 |
| 01F12R2 Kabat CDR1 | SYTMG | 1206 |
| 01F12R2 Kabat CDR2 | AISWSSDGTYYKYYT | 1207 |
| | DTVKG | |
| 01F12R2 Kabat CDR3 | SSSGTYGDPRSEREYRY | 1208 |
| 01F12R2 Chothia CDR1 | GRTFSSY | 1209 |
| 01F12R2 Chothia CDR2 | SWSSDGTYY | 1210 |
| 01F12R2 Chothia CDR3 | SSSGTYGDPRSEREYR | 1211 |
| 01F12R2 IMGT CDR1 | GRTFSSYT | 1212 |
| 01F12R2 IMGT CDR2 | ISWSSDGTYYK | 1213 |
| 01F12R2 IMGT CDR3 | AASSSGTYGDPRSEREYRY | 1214 |
| 01F12R2 Contact CDR1 | SSYTMG | 1215 |
| 01F12R2 Contact CDR2 | FVSAISWSSDGTYYKY | 1216 |
| 01F12R2 Contact CDR3 | AASSSGTYGDPRSEREYR | 1217 |
| 01G07R2L AbM CDR1 | GLPFSSSRMA | 1218 |
| 01G07R2L AbM CDR2 | AIGWRGRTSYKY | 1219 |
| 01G07R2L AbM CDR3 | HPNDDGDPRISGNYQY | 1220 |
| 01G07R2L Kabat CDR1 | SSRMA | 1221 |
| 01G07R2L Kabat CDR2 | AIGWRGRTSYKYYADSVKG | 1222 |
| 01G07R2L Kabat CDR3 | HPNDDGDPRISGNYQY | 1223 |
| 01G07R2L Chothia CDR1 | GLPFSSS | 1224 |
| 01G07R2L Chothia CDR2 | GWRGRTSY | 1225 |
| 01G07R2L Chothia CDR3 | HPNDDGDPRISGNYQ | 1226 |
| 01G07R2L IMGT CDR1 | GLPFSSSR | 1227 |
| 01G07R2L IMGT CDR2 | IGWRGRTSYK | 1228 |
| 01G07R2L IMGT CDR3 | AAHPNDDGDPRISGNYQY | 1229 |
| 01G07R2L Contact CDR1 | SSSRMA | 1230 |
| 01G07R2L Contact CDR2 | FVAAIGWRGRTSYKY | 1231 |
| 01G07R2L Contact CDR3 | AAHPNDDGDPRISGNYQ | 1232 |
| 01F09R3 AbM CDR1 | GTAAGIDVMG | 1233 |
| 01F09R3 AbM CDR2 | RIFSNDVTH | 1234 |
| 01F09R3 AbM CDR3 | RIWTGSTTVDY | 1235 |
| 01F09R3 Kabat CDR1 | IDVMG | 1236 |
| 01F09R3 Kabat CDR2 | RIFSNDVTHYADSVTG | 1237 |
| 01F09R3 Kabat CDR3 | RIWTGSTTVDY | 1238 |
| 01F09R3 Chothia CDR1 | GTAAGID | 1239 |
| 01F09R3 Chothia CDR2 | FSNDV | 1240 |
| 01F09R3 Chothia CDR3 | RIWTGSTTVD | 1241 |
| 01F09R3 IMGT CDR1 | GTAAGIDV | 1242 |
| 01F09R3 IMGT CDR2 | IFSNDVT | 1243 |
| 01F09R3 IMGT CDR3 | NARIWTGSTTVDY | 1244 |
| 01F09R3 Contact CDR1 | GIDVMG | 1245 |
| 01F09R3 Contact CDR2 | FVARIFSNDVTH | 1246 |
| 01F09R3 Contact CDR3 | NARIWTGSTTVD | 1247 |
| 01A03R3L AbM CDR1 | GSIASVRDMA | 1248 |
| 01A03R3L AbM CDR2 | IFARGGTTH | 1249 |
| 01A03R3L AbM CDR3 | EVATMFQPGFRDY | 1250 |
| 01A03R3L Kabat CDR1 | VRDMA | 1251 |
| 01A03R3L Kabat CDR2 | IFARGGTTHYADSVKG | 1252 |
| 01A03R3L Kabat CDR3 | EVATMFQPGFRDY | 1253 |
| 01A03R3L Chothia CDR1 | GSIASVR | 1254 |
| 01A03R3L Chothia CDR2 | ARGGT | 1255 |
| 01A03R3L Chothia CDR3 | EVATMFQPGFRD | 1256 |
| 01A03R3L IMGT CDR1 | GSIASVRD | 1257 |
| 01A03R3L IMGT CDR2 | FARGGTT | 1258 |
| 01A03R3L IMGT CDR3 | NAEVATMFQPGFRDY | 1259 |
| 01A03R3L Contact CDR1 | SVRDMA | 1260 |
| 01A03R3L Contact CDR2 | LVAIFARGGTTH | 1261 |
| 01A03R3L Contact CDR3 | NAEVATMFQPGFRD | 1262 |
| 01G03R3L AbM CDR1 | GRTFSNYAMG | 1263 |
| 01G03R3L AbM CDR2 | GISRSGGSTY | 1264 |
| 01G03R3L AbM CDR3 | DGLDYALGFRGDY | 1265 |
| 01G03R3L Kabat CDR1 | NYAMG | 1266 |
| 01G03R3L Kabat CDR2 | GISRSGGSTYSADSVKG | 1267 |
| 01G03R3L Kabat CDR3 | DGLDYALGFRGDY | 1268 |
| 01G03R3L Chothia CDR1 | GRTFSNY | 1269 |
| 01G03R3L Chothia CDR2 | SRSGGS | 1270 |
| 01G03R3L Chothia CDR3 | DGLDYALGFRGD | 1271 |
| 01G03R3L IMGT CDR1 | GRTFSNYA | 1272 |
| 01G03R3L IMGT CDR2 | ISRSGGST | 1273 |
| 01G03R3L IMGT CDR3 | AADGLDYALGFRGDY | 1274 |
| 01G03R3L Contact CDR1 | SNYAMG | 1275 |
| 01G03R3L Contact CDR2 | FVAGISRSGGSTY | 1276 |
| 01G03R3L Contact CDR3 | AADGLDYALGFRGD | 1277 |
| 01H11R3LS AbM CDR1 | GRTINGYVMG | 1278 |
| 01H11R3LS AbM CDR2 | RIDWSGSSTD | 1279 |
| 01H11R3LS AbM CDR3 | SAYYSGYVTHRDFGS | 1280 |
| 01H11R3LS Kabat CDR1 | GYVMG | 1281 |
| 01H11R3LS Kabat CDR2 | RIDWSGSSTDYADSVKG | 1282 |
| 01H11R3LS Kabat CDR3 | SAYYSGYVTHRDFGS | 1283 |
| 01H11R3LS Chothia CDR1 | GRTINGY | 1284 |
| 01H11R3LS Chothia CDR2 | DWSGSS | 1285 |
| 01H11R3LS Chothia CDR3 | SAYYSGYVTHRDFG | 1286 |
| 01H11R3LS IMGT CDR1 | GRTINGYV | 1287 |
| 01H11R3LS IMGT CDR2 | IDWSGSST | 1288 |
| 01H11R3LS IMGT CDR3 | AGSAYYSGYVTHRDFGS | 1289 |
| 01H11R3LS Contact CDR1 | NGYVMG | 1290 |
| 01H11R3LS Contact CDR2 | FVARIDWSGSSTD | 1291 |
| 01H11R3LS Contact CDR3 | AGSAYYSGYVTHRDFG | 1292 |
| 01F05R2LS AbM CDR1 | GSIFAINGMG | 1293 |
| 01F05R2LS AbM CDR2 | VITRGGSTN | 1294 |
| 01F05R2LS AbM CDR3 | TGVLAGWAAGDGMDY | 1295 |
| 01F05R2LS Kabat CDR1 | INGMG | 1296 |
| 01F05R2LS Kabat CDR2 | VITRGGSTNYADSVKG | 1297 |
| 01F05R2LS Kabat CDR3 | TGVLAGWAAGDGMDY | 1298 |
| 01F05R2LS Chothia CDR1 | GSIFAIN | 1299 |
| 01F05R2LS Chothia CDR2 | TRGGS | 1300 |
| 01F05R2LS Chothia CDR3 | TGVLAGWAAGDGMD | 1301 |
| 01F05R2LS IMGT CDR1 | GSIFAING | 1302 |
| 01F05R2LS IMGT CDR2 | ITRGGST | 1303 |
| 01F05R2LS IMGT CDR3 | AATGVLAGWAAGDGMDY | 1304 |
| 01F05R2LS Contact CDR1 | AINGMG | 1305 |
| 01F05R2LS Contact CDR2 | LVAVITRGGSTN | 1306 |
| 01F05R2LS Contact CDR3 | AATGVLAGWAAGDGMD | 1307 |
| 01D05R2LS AbM CDR1 | GRTFSPYAMG | 1308 |
| 01D05R2LS AbM CDR2 | AIRWSGATTYKY | 1309 |
| 01D05R2LS AbM CDR3 | DRVPKDISIDPRNPKDWDY | 1310 |
| 01D05R2LS Kabat CDR1 | PYAMG | 1311 |
| 01D05R2LS Kabat CDR2 | AIRWSGATTYKYVGDSVQG | 1312 |
| 01D05R2LS Kabat CDR3 | DRVPKDISIDPRNPKDWDY | 1313 |
| 01D05R2LS Chothia CDR1 | GRTFSPY | 1314 |
| 01D05R2LS Chothia CDR2 | RWSGATTY | 1315 |
| 01D05R2LS Chothia CDR3 | DRVPKDISIDPRNPKDWD | 1316 |
| 01D05R2LS IMGT CDR1 | GRTFSPYA | 1317 |
| 01D05R2LS IMGT CDR2 | IRWSGATTYK | 1318 |
| 01D05R2LS IMGT CDR3 | AADRVPKDISIDPRN | 1319 |
| | PKDWDY | |
| 01D05R2LS Contact CDR1 | SPYAMG | 1320 |
| 01D05R2LS Contact CDR2 | FVAAIRWSGATTYKY | 1321 |
| 01D05R2LS Contact CDR3 | AADRVPKDISIDPRNP | 1322 |
| | KDWD | |
| 01H03R2L AbM CDR1 | GRSFSSYNMG | 1323 |
| 01H03R2L AbM CDR2 | VVTWSGGGTS | 1324 |
| 01H03R2L AbM CDR3 | TQDWYGGTRAFHAASFHS | 1325 |
| 01H03R2L Kabat CDR1 | SYNMG | 1326 |
| 01H03R2L Kabat CDR2 | VVTWSGGGTSYADSVKG | 1327 |
| 01H03R2L Kabat CDR3 | TQDWYGGTRAFHAASFHS | 1328 |
| 01H03R2L Chothia CDR1 | GRSFSSY | 1329 |
| 01H03R2L Chothia CDR2 | TWSGGG | 1330 |
| 01H03R2L Chothia CDR3 | TQDWYGGTRAFHAASFH | 1331 |
| 01H03R2L IMGT CDR1 | GRSFSSYN | 1332 |
| 01H03R2L IMGT CDR2 | VTWSGGGT | 1333 |
| 01H03R2L IMGT CDR3 | AATQDWYGGTRAFHAA | 1334 |
| | SFHS | |
| 01H03R2L Contact CDR1 | SSYNMG | 1335 |
| 01H03R2L Contact CDR2 | LVAVVTWSGGGTS | 1336 |
| 01H03R2L Contact CDR3 | AATQDWYGGTRAFHAASFH | 1337 |
| 01B04R2 AbM CDR1 | GRTFTSYTMG | 1338 |
| 01B04R2 AbM CDR2 | AIKWNGGSTY | 1339 |
| 01B04R2 AbM CDR3 | DGDPYFSPTDGIVVVHAP | 1340 |
| | HQSEYDY | |
| 01B04R2 Kabat CDR1 | SYTMG | 1341 |
| 01B04R2 Kabat CDR2 | AIKWNGGSTYYADSVKG | 1342 |
| 01B04R2 Kabat CDR3 | DGDPYFSPTDGIVVVHAPH | 1343 |
| | QSEYDY | |
| 01B04R2 Chothia CDR1 | GRTFTSY | 1344 |
| 01B04R2 Chothia CDR2 | KWNGGS | 1345 |
| 01B04R2 Chothia CDR3 | DGDPYFSPTDGIVVVHAPH | 1346 |
| | QSEYD | |
| 01B04R2 IMGT CDR1 | GRTFTSYT | 1347 |
| 01B04R2 IMGT CDR2 | IKWNGGST | 1348 |
| 01B04R2 IMGT CDR3 | AADGDPYFSPTDGIVVVH | 1349 |
| | APHQSEYDY | |
| 01B04R2 Contact CDR1 | TSYTMG | 1350 |
| 01B04R2 Contact CDR2 | FVAAIKWNGGSTY | 1351 |
| 01B04R2 Contact CDR3 | AADGDPYFSPTDGIVVV | 1352 |
| | HAPHQSEYD | |
| 01C09R3 AbM CDR1 | GFTFRTYYMG | 1353 |
| 01C09R3 AbM CDR2 | VTRSSDDVTY | 1354 |
| 01C09R3 AbM CDR3 | KPVPITRYSFPQIGEEYDY | 1355 |
| 01C09R3 Kabat CDR1 | TYYMG | 1356 |
| 01C09R3 Kabat CDR2 | VTRSSDDVTYYADSVKG | 1357 |
| 01C09R3 Kabat CDR3 | KPVPITRYSFPQIGEEYDY | 1358 |
| 01C09R3 Chothia CDR1 | GFTFRTY | 1359 |
| 01C09R3 Chothia CDR2 | RSSDDV | 1360 |
| 01C09R3 Chothia CDR3 | KPVPITRYSFPQIGEEYD | 1361 |
| 01C09R3 IMGT CDR1 | GFTFRTYY | 1362 |
| 01C09R3 IMGT CDR2 | TRSSDDVT | 1363 |
| 01C09R3 IMGT CDR3 | AAKPVPITRYSFPQIG | 1364 |
| | EEYDY | |
| 01C09R3 Contact CDR1 | RTYYMG | 1365 |
| 01C09R3 Contact CDR2 | FVGVTRSSDDVTY | 1366 |
| 01C09R3 Contact CDR3 | AAKPVPITRYSFPQIG | 1367 |
| | EEYD | |
| 01B12R3LS AbM CDR1 | GRTINGYVMG | 1368 |
| 01B12R3LS AbM CDR2 | RIDWSGSSTD | 1369 |
| 01B12R3LS AbM CDR3 | SAYYSGYVTHRDFGS | 1370 |
| 01B12R3LS Kabat CDR1 | GYVMG | 1371 |
| 01B12R3LS Kabat CDR2 | RIDWSGSSTDYADSVKG | 1372 |
| 01B12R3LS Kabat CDR3 | SAYYSGYVTHRDFGS | 1373 |
| 01B12R3LS Chothia CDR1 | GRTINGY | 1374 |
| 01B12R3LS Chothia CDR2 | DWSGSS | 1375 |
| 01B12R3LS Chothia CDR3 | SAYYSGYVTHRDFG | 1376 |
| 01B12R3LS IMGT CDR1 | GRTINGYV | 1377 |
| 01B12R3LS IMGT CDR2 | IDWSGSST | 1378 |
| 01B12R3LS IMGT CDR3 | AGSAYYSGYVTHRDFGS | 1379 |
| 01B12R3LS Contact CDR1 | NGYVMG | 1380 |
| 01B 12R3LS Contact CDR2 | FVARIDWSGSSTD | 1381 |
| 01B12R3LS Contact CDR3 | AGSAYYSGYVTHRDFG | 1382 |
| 01A01R3 AbM CDR1 | GSGRTFTSYTMG | 1383 |
| 01A01R3 AbM CDR2 | ALTWADDSTYYKY | 1384 |
| 01A01R3 AbM CDR3 | TGRGLTYDPRDRRKYDY | 1385 |
| 01A01R3 Kabat CDR1 | FTSYTMG | 1386 |
| 01A01R3 Kabat CDR2 | ALTWADDSTYYKYYAD | 1387 |
| | SMKG | |
| 01A01R3 Kabat CDR3 | TGRGLTYDPRDRRKYDY | 1388 |
| 01A01R3 Chothia CDR1 | GSGRTFTSY | 1389 |
| 01A01R3 Chothia CDR2 | TWADDSTYY | 1390 |
| 01A01R3 Chothia CDR3 | TGRGLTYDPRDRRKYD | 1391 |
| 01A01R3 IMGT CDR1 | GSGRTFTSYT | 1392 |
| 01A01R3 IMGT CDR2 | LTWADDSTYYK | 1393 |
| 01A01R3 IMGT CDR3 | VATGRGLTYDPRDRRKYDY | 1394 |
| 01A01R3 Contact CDR1 | TFTSYTMG | 1395 |
| 01A01R3 Contact CDR2 | FVSALTWADDSTYYKY | 1396 |
| 01A01R3 Contact CDR3 | VATGRGLTYDPRDRRKYD | 1397 |
| 01G10R3LS AbM CDR1 | GRTINTYVTG | 1398 |
| 01G10R3LS AbM CDR2 | RIDWSGSSTD | 1399 |
| 01G10R3LS AbM CDR3 | SAYYSGYVTHRDFGS | 1400 |
| 01G10R3LS Kabat CDR1 | TYVTG | 1401 |
| 01G10R3LS Kabat CDR2 | RIDWSGSSTDYADSVKG | 1402 |
| 01G10R3LS Kabat CDR3 | SAYYSGYVTHRDFGS | 1403 |
| 01G10R3LS Chothia CDR1 | GRTINTY | 1404 |
| 01G10R3LS Chothia CDR2 | DWSGSS | 1405 |
| 01G10R3LS Chothia CDR3 | SAYYSGYVTHRDFG | 1406 |
| 01G10R3LS IMGT CDR1 | GRTINTYV | 1407 |
| 01G10R3LS IMGT CDR2 | IDWSGSST | 1408 |
| 01G10R3LS IMGT CDR3 | AGSAYYSGYVTHRDFGS | 1409 |
| 01G10R3LS Contact CDR1 | NTYVTG | 1410 |
| 01G10R3LS Contact CDR2 | FVARIDWSGSSTD | 1411 |
| 01G10R3LS Contact CDR3 | AGSAYYSGYVTHRDFG | 1412 |
| 01G08R3LS AbM CDR1 | GRTFTTYGMG | 1413 |
| 01G08R3LS AbM CDR2 | TITWSGSTNYKY | 1414 |
| 01G08R3LS AbM CDR3 | STVLTDPRRLNEYDY | 1415 |
| 01G08R3LS Kabat CDR1 | TYGMG | 1416 |
| 01G08R3LS Kabat CDR2 | TITWSGSTNYKYYTDSVKG | 1417 |
| 01G08R3LS Kabat CDR3 | STVLTDPRRLNEYDY | 1418 |
| 01G08R3LS Chothia CDR1 | GRTFTTY | 1419 |
| 01G08R3LS Chothia CDR2 | TWSGSTNY | 1420 |
| 01G08R3LS Chothia CDR3 | STVLTDPRRLNEYD | 1421 |
| 01G08R3LS IMGT CDR1 | GRTFTTYG | 1422 |
| 01G08R3LS IMGT CDR2 | ITWSGSTNYK | 1423 |
| 01G08R3LS IMGT CDR3 | AASTVLTDPRRLNEYDY | 1424 |
| 01G08R3LS Contact CDR1 | TTYGMG | 1425 |
| 01G08R3LS Contact CDR2 | FVATITWSGSTNYKY | 1426 |
| 01G08R3LS Contact CDR3 | AASTVLTDPRRLNEYD | 1427 |
| 01H06R3L AbM CDR1 | GRTRTTYGMG | 1428 |
| 01H06R3L AbM CDR2 | TITWSGPTNYKY | 1429 |
| 01H06R3L AbM CDR3 | STVLTDPRVPTEYDY | 1430 |
| 01H06R3L Kabat CDR1 | TYGMG | 1431 |
| 01H06R3L Kabat CDR2 | TITWSGPTNYKYYADSVKG | 1432 |
| 01H06R3L Kabat CDR3 | STVLTDPRVPTEYDY | 1433 |
| 01H06R3L Chothia CDR1 | GRTRTTY | 1434 |
| 01H06R3L Chothia CDR2 | TWSGPTNY | 1435 |
| 01H06R3L Chothia CDR3 | STVLTDPRVPTEYD | 1436 |
| 01H06R3L IMGT CDR1 | GRTRTTYG | 1437 |
| 01H06R3L IMGT CDR2 | ITWSGPTNYK | 1438 |
| 01H06R3L IMGT CDR3 | AASTVLTDPRVPIEYDY | 1439 |
| 01H06R3L Contact CDR1 | TTYGMG | 1440 |
| 01H06R3L Contact CDR2 | FVTTITWSGPTNYKY | 1441 |
| 01H06R3L Contact CDR3 | AASTVLTDPRVPIEYD | 1442 |
| 01A07R3LS AbM CDR1 | GRTFPTYAMG | 1443 |
| 01A07R3LS AbM CDR2 | TIRWSGSTQYKY | 1444 |
| 01A07R3LS AbM CDR3 | TTLLGDPRALNEYAY | 1445 |
| 01A07R3LS Kabat CDR1 | TYAMG | 1446 |
| 01A07R3LS Kabat CDR2 | TIRWSGSTQYKYYADFVKG | 1447 |
| 01A07R3LS Kabat CDR3 | TTLLGDPRALNEYAY | 1448 |
| 01A07R3LS Chothia CDR1 | GRTFPTY | 1449 |
| 01A07R3LS Chothia CDR2 | RWSGSTQY | 1450 |
| 01A07R3LS Chothia CDR3 | TTLLGDPRALNEYA | 1451 |
| 01A07R3LS IMGT CDR1 | GRTFPTYA | 1452 |
| 01A07R3LS IMGT CDR2 | IRWSGSTQYK | 1453 |
| 01A07R3LS IMGT CDR3 | AATTLLGDPRALNEYAY | 1454 |
| 01A07R3LS Contact CDR1 | PTYAMG | 1455 |
| 01A07R3LS Contact CDR2 | FVATIRWSGSTQYKY | 1456 |
| 01A07R3LS Contact CDR3 | AATTLLGDPRALNEYA | 1457 |
| 03D12R3 AbM CDR1 | GRTFSSYAMG | 1458 |
| 03D12R3 AbM CDR2 | VITWNGGSTH | 1459 |
| 03D12R3 AbM CDR3 | DPMNSPY | 1460 |
| 03D12R3 Kabat CDR1 | SYAMG | 1461 |
| 03D12R3 Kabat CDR2 | VITWNGGSTHYADSVKG | 1462 |
| 03D12R3 Kabat CDR3 | DPMNSPY | 1463 |
| 03D12R3 Chothia CDR1 | GRTFSSY | 1464 |
| 03D12R3 Chothia CDR2 | TWNGGS | 1465 |
| 03D12R3 Chothia CDR3 | DPMNSP | 1466 |
| 03D12R3 IMGT CDR1 | GRTFSSYA | 1467 |
| 03D12R3 IMGT CDR2 | ITWNGGST | 1468 |
| 03D12R3 IMGT CDR3 | AADPMNSPY | 1469 |
| 03D12R3 Contact CDR1 | SSYAMG | 1470 |
| 03D12R3 Contact CDR2 | FAAVITWNGGSTH | 1471 |
| 03D12R3 Contact CDR3 | AADPMNSP | 1472 |
| 01A07R3 AbM CDR1 | GRAFSDLRMA | 1473 |
| 01A07R3 AbM CDR2 | AVEWRGSSRY | 1474 |
| 01A07R3 AbM CDR3 | VSPVVGDPRNSDTYNY | 1475 |
| 01A07R3 Kabat CDR1 | DLRMA | 1476 |
| 01A07R3 Kabat CDR2 | AVEWRGSSRYYYSADSVKG | 1477 |
| 01A07R3 Kabat CDR3 | VSPVVGDPRNSDTYNY | 1478 |
| 01A07R3 Chothia CDR1 | GRAFSDL | 1479 |
| 01A07R3 Chothia CDR2 | EWRGSS | 1480 |
| 01A07R3 Chothia CDR3 | VSPVVGDPRNSDTYN | 1481 |
| 01A07R3 IMGT CDR1 | GRAFSDLR | 1482 |
| 01A07R3 IMGT CDR2 | VEWRGSSR | 1483 |
| 01A07R3 IMGT CDR3 | AAVSPVVGDPRNSDTYNY | 1484 |
| 01A07R3 Contact CDR1 | SDLRMA | 1485 |
| 01A07R3 Contact CDR2 | FVAAVEWRGSSRY | 1486 |
| 01A07R3 Contact CDR3 | AAVSPVVGDPRNSDTYN | 1487 |
| 02B11R3 AbM CDR1 | GRTFSPYGMG | 1488 |
| 02B11R3 AbM CDR2 | AVDWNDGSTY | 1489 |
| 02B11R3 AbM CDR3 | DLTGWGLDADVSEYDY | 1490 |
| 02B11R3 Kabat CDR1 | PYGMG | 1491 |
| 02B11R3 Kabat CDR2 | AVDWNDGSTYYSDSVKG | 1492 |
| 02B11R3 Kabat CDR3 | DLTGWGLDADVSEYDY | 1493 |
| 02B11R3 Chothia CDR1 | GRTFSPY | 1494 |
| 02B11R3 Chothia CDR2 | DWNDGS | 1495 |
| 02B11R3 Chothia CDR3 | DLTGWGLDADVSEYD | 1496 |
| 02B11R3 IMGT CDR1 | GRTFSPYG | 1497 |
| 02B11R3 IMGT CDR2 | VDWNDGST | 1498 |
| 02B11R3 IMGT CDR3 | AADLTGWGLDADVSEYDY | 1499 |
| 02B11R3 Contact CDR1 | SPYGMG | 1500 |
| 02B11R3 Contact CDR2 | FVAAVDWNDGSTY | 1501 |
| 02B11R3 Contact CDR3 | AADLTGWGLDADVSEYD | 1502 |
| 01B07R3L AbM CDR1 | GLPFSSSRMG | 1503 |
| 01B07R3L AbM CDR2 | AIGWSGRSTYRY | 1504 |
| 01B07R3L AbM CDR3 | DPNYYGDVRTSGTYQY | 1505 |
| 01B07R3L Kabat CDR1 | SSRMG | 1506 |
| 01B07R3L Kabat CDR2 | AIGWSGRSTYRYYDDSVKG | 1507 |
| 01B07R3L Kabat CDR3 | DPNYYGDVRTSGTYQY | 1508 |
| 01B07R3L Chothia CDR1 | GLPFSSS | 1509 |
| 01B07R3L Chothia CDR2 | GWSGRSTY | 1510 |
| 01B07R3L Chothia CDR3 | DPNYYGDVRTSGTYQ | 1511 |
| 01B07R3L IMGT CDR1 | GLPFSSSR | 1512 |
| 01B07R3L IMGT CDR2 | IGWSGRSTYR | 1513 |
| 01B07R3L IMGT CDR3 | AADPNYYGDVRTSGTYQY | 1514 |
| 01B07R3L Contact CDR1 | SSSRMG | 1515 |
| 01B07R3L Contact CDR2 | FVAAIGWSGRSTYRY | 1516 |
| 01B07R3L Contact CDR3 | AADPNYYGDVRTSGTYQ | 1517 |
| 01G05R2LS AbM CDR1 | GDTFSNYAMG | 1518 |
| 01G05R2LS AbM CDR2 | DISWYSANIG | 1519 |
| 01G05R2LS AbM CDR3 | DRNHWPVKGDY | 1520 |
| 01G05R2LS Kabat CDR1 | NYAMG | 1521 |
| 01G05R2LS Kabat CDR2 | DISWYSANIGYADSVKG | 1522 |
| 01G05R2LS Kabat CDR3 | DRNHWPVKGDY | 1523 |
| 01G05R2LS Chothia CDR1 | GDTFSNY | 1524 |
| 01G05R2LS Chothia CDR2 | SWYSAN | 1525 |
| 01G05R2LS Chothia CDR3 | DRNHWPVKGD | 1526 |
| 01G05R2LS IMGT CDR1 | GDTFSNYA | 1527 |
| 01G05R2LS IMGT CDR2 | ISWYSANI | 1528 |
| 01G05R2LS IMGT CDR3 | AADRNHWPVKGDY | 1529 |
| 01G05R2LS Contact CDR1 | SNYAMG | 1530 |
| 01G05R2LS Contact CDR2 | FVADISWYSANIG | 1531 |
| 01G05R2LS Contact CDR3 | AADRNHWPVKGD | 1532 |
| 01H10R3 AbM CDR1 | GRAFSQYTMG | 1533 |
| 01H10R3 AbM CDR2 | AIRWSGGSIYKY | 1534 |
| 01H10R3 AbM CDR3 | RMSPWGDPRGNEYDY | 1535 |
| 01H10R3 Kabat CDR1 | QYTMG | 1536 |
| 01H10R3 Kabat CDR2 | AIRWSGGSIYKYYADSVKG | 1537 |
| 01H10R3 Kabat CDR3 | RMSPWGDPRGNEYDY | 1538 |
| 01H10R3 Chothia CDR1 | GRAFSQY | 1539 |
| 01H10R3 Chothia CDR2 | RWSGGSIY | 1540 |
| 01H10R3 Chothia CDR3 | RMSPWGDPRGNEYD | 1541 |
| 01H10R3 IMGT CDR1 | GRAFSQYT | 1542 |
| 01H10R3 IMGT CDR2 | IRWSGGSIYK | 1543 |
| 01H10R3 IMGT CDR3 | AARMSPWGDPRGNEYDY | 1544 |
| 01H10R3 Contact CDR1 | SQYTMG | 1545 |
| 01H10R3 Contact CDR2 | FVTAIRWSGGSIYKY | 1546 |
| 01H10R3 Contact CDR3 | AARMSPWGDPRGNEYD | 1547 |
| 01H10R2 AbM CDR1 | GRTSSISTMG | 1548 |
| 01H10R2 AbM CDR2 | AIRWSGSSSYKY | 1549 |
| 01H10R2 AbM CDR3 | QMSLWRDPREIDYDY | 1550 |
| 01H10R2 Kabat CDR1 | ISTMG | 1551 |
| 01H10R2 Kabat CDR2 | AIRWSGSSSYKYYADSVKG | 1552 |
| 01H10R2 Kabat CDR3 | QMSLWRDPREIDYDY | 1553 |
| 01H10R2 Chothia CDR1 | GRTSSIS | 1554 |
| 01H10R2 Chothia CDR2 | RWSGSSSY | 1555 |
| 01H10R2 Chothia CDR3 | QMSLWRDPREIDYD | 1556 |
| 01H10R2 IMGT CDR1 | GRTSSIST | 1557 |
| 01H10R2 IMGT CDR2 | IRWSGSSSYK | 1558 |
| 01H10R2 IMGT CDR3 | AAQMSLWRDPREIDYDY | 1559 |
| 01H10R2 Contact CDR1 | SISTMG | 1560 |
| 01H10R2 Contact CDR2 | FVTAIRWSGSSSYKY | 1561 |
| 01H10R2 Contact CDR3 | AAQMSLWRDPREIDYD | 1562 |
| 01C03R3LS AbM CDR1 | GLPGSSSRMA | 1563 |
| 01C03R3LS AbM CDR2 | AIAWRGRTSYKY | 1564 |
| 01C03R3LS AbM CDR3 | HPNDDGDPRISGNYQY | 1565 |
| 01C03R3LS Kabat CDR1 | SSRMA | 1566 |
| 01C03R3LS Kabat CDR2 | AIAWRGRTSYKYYSDSVKG | 1567 |
| 01C03R3LS Kabat CDR3 | HPNDDGDPRISGNYQY | 1568 |
| 01C03R3LS Chothia CDR1 | GLPGSSS | 1569 |
| 01C03R3LS Chothia CDR2 | AWRGRTSY | 1570 |
| 01C03R3LS Chothia CDR3 | HPNDDGDPRISGNYQ | 1571 |
| 01C03R3LS IMGT CDR1 | GLPGSSSR | 1572 |
| 01C03R3LS IMGT CDR2 | IAWRGRTSYK | 1573 |
| 01C03R3LS IMGT CDR3 | AAHPNDDGDPRISGNYQY | 1574 |
| 01C03R3LS Contact CDR1 | SSSRMA | 1575 |
| 01C03R3LS Contact CDR2 | FVAAIAWRGRTSYKY | 1576 |
| 01C03R3LS Contact CDR3 | AAHPNDDGDPRISGNYQ | 1577 |
| 01C03R3 AbM CDR1 | GRTFSSYAMG | 1578 |
| 01C03R3 AbM CDR2 | AIHWNGASTYRY | 1579 |
| 01C03R3 AbM CDR3 | SPPPTVGDVRDPANYDS | 1580 |
| 01C03R3 Kabat CDR1 | SYAMG | 1581 |
| 01C03R3 Kabat CDR2 | AIHWNGASTYRYSADSVKG | 1582 |
| 01C03R3 Kabat CDR3 | SPPPTVGDVRDPANYDS | 1583 |
| 01C03R3 Chothia CDR1 | GRTFSSY | 1584 |
| 01C03R3 Chothia CDR2 | HWNGASTY | 1585 |
| 01C03R3 Chothia CDR3 | SPPPTVGDVRDPANYD | 1586 |
| 01C03R3 IMGT CDR1 | GRTFSSYA | 1587 |
| 01C03R3 IMGT CDR2 | IHWNGASTYR | 1588 |
| 01C03R3 IMGT CDR3 | AASPPPTVGDVRDPANYDS | 1589 |
| 01C03R3 Contact CDR1 | SSYAMG | 1590 |
| 01C03R3 Contact CDR2 | FVAAIHWNGASTYRY | 1591 |
| 01C03R3 Contact CDR3 | AASPPPTVGDVRDPANYD | 1592 |
| 01F04R3LS AbM CDR1 | GRTFSRYAMG | 1593 |
| 01F04R3LS AbM CDR2 | AIAWSGGAIY | 1594 |
| 01F04R3LS AbM CDR3 | TRDPRVGDKKFYDY | 1595 |
| 01F04R3LS Kabat CDR1 | RYAMG | 1596 |
| 01F04R3LS Kabat CDR2 | AIAWSGGAIYYADFVKG | 1597 |
| 01F04R3LS Kabat CDR3 | TRDPRVGDKKFYDY | 1598 |
| 01F04R3LS Chothia CDR1 | GRTFSRY | 1599 |
| 01F04R3LS Chothia CDR2 | AWSGGA | 1600 |
| 01F04R3LS Chothia CDR3 | TRDPRVGDKKFYD | 1601 |
| 01F04R3LS IMGT CDR1 | GRTFSRYA | 1602 |
| 01F04R3LS IMGT CDR2 | IAWSGGAI | 1603 |
| 01F04R3LS IMGT CDR3 | GSTRDPRVGDKKFYDY | 1604 |
| 01F04R3LS Contact CDR1 | SRYAMG | 1605 |
| 01F04R3LS Contact CDR2 | FVAAIAWSGGAIY | 1606 |
| 01F04R3LS Contact CDR3 | GSTRDPRVGDKKFYD | 1607 |
| 01E01R3LS AbM CDR1 | GRSFSSYNMG | 1608 |
| 01E01R3LS AbM CDR2 | VVTWSGGGTS | 1609 |
| 01E01R3LS AbM CDR3 | TQDWYGGTRAFRAASFHS | 1610 |
| 01E01R3LS Kabat CDR1 | SYNMG | 1611 |
| 01E01R3LS Kabat CDR2 | VVTWSGGGTSYADSVKG | 1612 |
| 01E01R3LS Kabat CDR3 | TQDWYGGTRAFRAASFHS | 1613 |
| 01E01R3LS Chothia CDR1 | GRSFSSY | 1614 |
| 01E01R3LS Chothia CDR2 | TWSGGG | 1615 |
| 01E01R3LS Chothia CDR3 | TQDWYGGTRAFRAASFH | 1616 |
| 01E01R3LS IMGT CDR1 | GRSFSSYN | 1617 |
| 01E01R3LS IMGT CDR2 | VTWSGGGT | 1618 |
| 01E01R3LS IMGT CDR3 | AATQDWYGGTRAFRAASFHS | 1619 |
| 01E01R3LS Contact CDR1 | SSYNMG | 1620 |
| 01E01R3LS Contact CDR2 | LVAVVTWSGGGTS | 1621 |
| 01E01R3LS Contact CDR3 | AATQDWYGGTRAFRAASFH | 1622 |
| 03D02R3 AbM CDR1 | GTISKIDVMA | 1623 |
| 03D02R3 AbM CDR2 | RIFSNDVTH | 1624 |
| 03D02R3 AbM CDR3 | QIWSDMRGRMDTY | 1625 |
| 03D02R3 Kabat CDR1 | IDVMA | 1626 |
| 03D02R3 Kabat CDR2 | RIFSNDVTHYVDSAKG | 1627 |
| 03D02R3 Kabat CDR3 | QIWSDMRGRMDTY | 1628 |
| 03D02R3 Chothia CDR1 | GTISKID | 1629 |
| 03D02R3 Chothia CDR2 | FSNDV | 1630 |
| 03D02R3 Chothia CDR3 | QIWSDMRGRMDT | 1631 |
| 03D02R3 IMGT CDR1 | GTISKIDV | 1632 |
| 03D02R3 IMGT CDR2 | IFSNDVT | 1633 |
| 03D02R3 IMGT CDR3 | NAQIWSDMRGRMDTY | 1634 |
| 03D02R3 Contact CDR1 | KIDVMA | 1635 |
| 03D02R3 Contact CDR2 | LVARIFSNDVTH | 1636 |
| 03D02R3 Contact CDR3 | NAQIWSDMRGRMDT | 1637 |
| 01A02R3 AbM CDR1 | GRTFDQFTVG | 1638 |
| 01A02R3 AbM CDR2 | AIRWSGSTTYRY | 1639 |
| 01A02R3 AbM CDR3 | QMSQWSDPRGDDYDS | 1640 |
| 01A02R3 Kabat CDR1 | QFTVG | 1641 |
| 01A02R3 Kabat CDR2 | AIRWSGSTTYRYYADSVKG | 1642 |
| 01A02R3 Kabat CDR3 | QMSQWSDPRGDDYDS | 1643 |
| 01A02R3 Chothia CDR1 | GRTFDQF | 1644 |
| 01A02R3 Chothia CDR2 | RWSGSTTY | 1645 |
| 01A02R3 Chothia CDR3 | QMSQWSDPRGDDYD | 1646 |
| 01A02R3 IMGT CDR1 | GRTFDQFT | 1647 |
| 01A02R3 IMGT CDR2 | IRWSGSTTYR | 1648 |
| 01A02R3 IMGT CDR3 | AGQMSQWSDPRGDDYDS | 1649 |
| 01A02R3 Contact CDR1 | DQFTVG | 1650 |
| 01A02R3 Contact CDR2 | FVTAIRWSGSTTYRY | 1651 |
| 01A02R3 Contact CDR3 | AGQMSQWSDPRGDDYD | 1652 |
| 01B06R2LS AbM CDR1 | GRTFSPYAMG | 1653 |
| 01B06R2LS AbM CDR2 | AIRWSGATTYKY | 1654 |
| 01B06R2LS AbM CDR3 | DRVPKDISIDPRNPKDWDY | 1655 |
| 01B06R2LS Kabat CDR1 | PYAMG | 1656 |
| 01B06R2LS Kabat CDR2 | AIRWSGATTYKYVGDSVQG | 1657 |
| 01B06R2LS Kabat CDR3 | DRVPKDISIDPRNPKDWDY | 1658 |
| 01B06R2LS Chothia CDR1 | GRTFSPY | 1659 |
| 01B06R2LS Chothia CDR2 | RWSGATTY | 1660 |
| 01B06R2LS Chothia CDR3 | DRVPKDISIDPRNPKDWD | 1661 |
| 01B06R2LS IMGT CDR1 | GRTFSPYA | 1662 |
| 01B06R2LS IMGT CDR2 | IRWSGATTYK | 1663 |
| 01B06R2LS IMGT CDR3 | AADRVPKDISIDPRN | 1664 |
| | PKDWDY | |
| 01B06R2LS Contact CDR1 | SPYAMG | 1665 |
| 01B06R2LS Contact CDR2 | FVAAIRWSGATTYKY | 1666 |
| 01B06R2LS Contact CDR3 | AADRVPKDISIDP | 1667 |
| | RNPKDWD | |
| 02B03R3 AbM CDR1 | GSIASIRDMA | 1668 |
| 02B03R3 AbM CDR2 | IFARGGTTH | 1669 |
| 02B03R3 AbM CDR3 | EVATMFQPGFRDY | 1670 |
| 02B03R3 Kabat CDR1 | IRDMA | 1671 |
| 02B03R3 Kabat CDR2 | IFARGGTTHYADSVKG | 1672 |
| 02B03R3 Kabat CDR3 | EVATMFQPGFRDY | 1673 |
| 02B03R3 Chothia CDR1 | GSIASIR | 1674 |
| 02B03R3 Chothia CDR2 | ARGGT | 1675 |
| 02B03R3 Chothia CDR3 | EVATMFQPGFRD | 1676 |
| 02B03R3 IMGT CDR1 | GSIASIRD | 1677 |
| 02B03R3 IMGT CDR2 | FARGGTT | 1678 |
| 02B03R3 IMGT CDR3 | NAEVATMFQPGFRDY | 1679 |
| 02B03R3 Contact CDR1 | SIRDMA | 1680 |
| 02B03R3 Contact CDR2 | LVAIFARGGTTH | 1681 |
| 02B03R3 Contact CDR3 | NAEVATMFQPGFRD | 1682 |
| 01B07R2L AbM CDR1 | GRTFSSDAVG | 1683 |
| 01B07R2L AbM CDR2 | HIHWSGDFTTYYY | 1684 |
| 01B07R2L AbM CDR3 | PKGAIGDPRSTREYDY | 1685 |
| 01B07R2L Kabat CDR1 | SDAVG | 1686 |
| 01B07R2L Kabat CDR2 | HIHWSGDFTTYYYYG | 1687 |
| | DFVKG | |
| 01B07R2L Kabat CDR3 | PKGAIGDPRSTREYDY | 1688 |
| 01B07R2L Chothia CDR1 | GRTFSSD | 1689 |
| 01B07R2L Chothia CDR2 | HWSGDFTTY | 1690 |
| 01B07R2L Chothia CDR3 | PKGAIGDPRSTREYD | 1691 |
| 01B07R2L IMGT CDR1 | GRTFSSDA | 1692 |
| 01B07R2L IMGT CDR2 | IHWSGDFTTYY | 1693 |
| 01B07R2L IMGT CDR3 | AAPKGAIGDPRSTREYDY | 1694 |
| 01B07R2L Contact CDR1 | SSDAVG | 1695 |
| 01B07R2L Contact CDR2 | FVAHIHWSGDFTTYYY | 1696 |
| 01B07R2L Contact CDR3 | AAPKGAIGDPRSTREYD | 1697 |
| 01D07R3LS AbM CDR1 | GRTINTYVMG | 1698 |
| 01D07R3LS AbM CDR2 | RIDWSGSSTD | 1699 |
| 01D07R3LS AbM CDR3 | SAYYSGYVTHRDFGS | 1700 |
| 01D07R3LS Kabat CDR1 | TYVMG | 1701 |
| 01D07R3LS Kabat CDR2 | RIDWSGSSTDYADSVKG | 1702 |
| 01D07R3LS Kabat CDR3 | SAYYSGYVTHRDFGS | 1703 |
| 01D07R3LS Chothia CDR1 | GRTINTY | 1704 |
| 01D07R3LS Chothia CDR2 | DWSGSS | 1705 |
| 01D07R3LS Chothia CDR3 | SAYYSGYVTHRDFG | 1706 |
| 01D07R3LS IMGT CDR1 | GRTINTYV | 1707 |
| 01D07R3LS IMGT CDR2 | IDWSGSST | 1708 |
| 01D07R3LS IMGT CDR3 | AGSAYYSGYVTHRDFGS | 1709 |
| 01D07R3LS Contact CDR1 | NTYVMG | 1710 |
| 01D07R3LS Contact CDR2 | FVAR1DWSGSSTD | 1711 |
| 01D07R3LS Contact CDR3 | AGSAYYSGYVTHRDFG | 1712 |
| 03B07R3 AbM CDR1 | GRTFSSNPMG | 1713 |
| 03B07R3 AbM CDR2 | AISWSGGGTY | 1714 |
| 03B07R3 AbM CDR3 | RDYSDPISLWVEDREYDY | 1715 |
| 03B07R3 Kabat CDR1 | SNPMG | 1716 |
| 03B07R3 Kabat CDR2 | AISWSGGGTYYADSVKG | 1717 |
| 03B07R3 Kabat CDR3 | RDYSDPISLWVEDREYDY | 1718 |
| 03B07R3 Chothia CDR1 | GRTFSSN | 1719 |
| 03B07R3 Chothia CDR2 | SWSGGG | 1720 |
| 03B07R3 Chothia CDR3 | RDYSDPISLWVEDREYD | 1721 |
| 03B07R3 IMGT CDR1 | GRTFSSNP | 1722 |
| 03B07R3 IMGT CDR2 | ISWSGGGT | 1723 |
| 03B07R3 IMGT CDR3 | ASRDYSDPISLWVE | 1724 |
| | DREYDY | |
| 03B07R3 Contact CDR1 | SSNPMG | 1725 |
| 03B07R3 Contact CDR2 | FVAAISWSGGGTY | 1726 |
| 03B07R3 Contact CDR3 | ASRDYSDPISLWVEDREYD | 1727 |
| 01A06R3LS AbM CDR1 | GLPFSSSRMG | 1728 |
| 01A06R3LS AbM CDR2 | AIGWSGRSTYKY | 1729 |
| 01A06R3LS AbM CDR3 | HPDYYGDPRTSGAYRY | 1730 |
| 01A06R3LS Kabat CDR1 | SSRMG | 1731 |
| 01A06R3LS Kabat CDR2 | AIGWSGRSTYKYYADSVKG | 1732 |
| 01A06R3LS Kabat CDR3 | HPDYYGDPRTSGAYRY | 1733 |
| 01A06R3LS Chothia CDR1 | GLPFSSS | 1734 |
| 01A06R3LS Chothia CDR2 | GWSGRSTY | 1735 |
| 01A06R3LS Chothia CDR3 | HPDYYGDPRTSGAYR | 1736 |
| 01A06R3LS IMGT CDR1 | GLPFSSSR | 1737 |
| 01A06R3LS IMGT CDR2 | IGWSGRSTYK | 1738 |
| 01A06R3LS IMGT CDR3 | AAHPDYYGDPRTSGAYRY | 1739 |
| 01A06R3LS Contact CDR1 | SSSRMG | 1740 |
| 01A06R3LS Contact CDR2 | FVAAIGWSGRSTYKY | 1741 |
| 01A06R3LS Contact CDR3 | AAHPDYYGDPRTSGAYR | 1742 |
| 01D08R3 AbM CDR1 | GRTSSLYNMG | 1743 |
| 01D08R3 AbM CDR2 | AIHWGGGRTY | 1744 |
| 01D08R3 AbM CDR3 | RRAPELLDDYKQKP | 1745 |
| | EEIGAYHY | |
| 01D08R3 Kabat CDR1 | LYNMG | 1746 |
| 01D08R3 Kabat CDR2 | AIHWGGGRTYYADSVKG | 1747 |
| 01D08R3 Kabat CDR3 | RRAPELLDDYKQKPE | 1748 |
| | EIGAYHY | |
| 01D08R3 Chothia CDR1 | GRTSSLY | 1749 |
| 01D08R3 Chothia CDR2 | HWGGGR | 1750 |
| 01D08R3 Chothia CDR3 | RRAPELLDDYKQKPE | 1751 |
| | EIGAYH | |
| 01D08R3 IMGT CDR1 | GRTSSLYN | 1752 |
| 01D08R3 IMGT CDR2 | IHWGGGRT | 1753 |
| 01D08R3 IMGT CDR3 | AARRAPELLDDYKQKPE | 1754 |
| | EIGAYHY | |
| 01D08R3 Contact CDR1 | SLYNMG | 1755 |
| 01D08R3 Contact CDR2 | FVAAIHWGGGRTY | 1756 |
| 01D08R3 Contact CDR3 | AARRAPELLDDYKQKPE | 1757 |
| | EIGAYH | |
| 01E03R2 AbM CDR1 | GRTFSVYGMG | 1758 |
| 01E03R2 AbM CDR2 | AISWSDGSTY | 1759 |
| 01E03R2 AbM CDR3 | DLTGWGLDADVSEYDY | 1760 |
| 01E03R2 Kabat CDR1 | VYGMG | 1761 |
| 01E03R2 Kabat CDR2 | AISWSDGSTYYADSVKG | 1762 |
| 01E03R2 Kabat CDR3 | DLTGWGLDADVSEYDY | 1763 |
| 01E03R2 Chothia CDR1 | GRTFSVY | 1764 |
| 01E03R2 Chothia CDR2 | SWSDGS | 1765 |
| 01E03R2 Chothia CDR3 | DLTGWGLDADVSEYD | 1766 |
| 01E03R2 IMGT CDR1 | GRTFSVYG | 1767 |
| 01E03R2 IMGT CDR2 | ISWSDGST | 1768 |
| 01E03R2 IMGT CDR3 | AADLTGWGLDADVSEYDY | 1769 |
| 01E03R2 Contact CDR1 | SVYGMG | 1770 |
| 01E03R2 Contact CDR2 | FVAAISWSDGSTY | 1771 |
| 01E03R2 Contact CDR3 | AADLTGWGLDADVSEYD | 1772 |
| 02D07R3 AbM CDR1 | GSIASIRDMA | 1773 |
| 02D07R3 AbM CDR2 | IFARGGTTH | 1774 |
| 02D07R3 AbM CDR3 | EVATMFQPGFRDY | 1775 |
| 02D07R3 Kabat CDR1 | IRDMA | 1776 |
| 02D07R3 Kabat CDR2 | IFARGGTTHYADSVKG | 1777 |
| 02D07R3 Kabat CDR3 | EVATMFQPGFRDY | 1778 |
| 02D07R3 Chothia CDR1 | GSIASIR | 1779 |
| 02D07R3 Chothia CDR2 | ARGGT | 1780 |
| 02D07R3 Chothia CDR3 | EVATMFQPGFRD | 1781 |
| 02D07R3 IMGT CDR1 | GSIASIRD | 1782 |
| 02D07R3 IMGT CDR2 | FARGGTT | 1783 |
| 02D07R3 IMGT CDR3 | NAEVATMFQPGFRDY | 1784 |
| 02D07R3 Contact CDR1 | SIRDMA | 1785 |
| 02D07R3 Contact CDR2 | LVAIFARGGTTH | 1786 |
| 02D07R3 Contact CDR3 | NAEVATMFQPGFRD | 1787 |
| 01E05R2 AbM CDR1 | GRAFSSGRMG | 1788 |
| 01E05R2 AbM CDR2 | AISWSGHTTYKY | 1789 |
| 01E05R2 AbM CDR3 | RQSLVAGGDPRGQSEYDY | 1790 |
| 01E05R2 Kabat CDR1 | SGRMG | 1791 |
| 01E05R2 Kabat CDR2 | AISWSGHTTYKYYA | 1792 |
| | DSVKG | |
| 01E05R2 Kabat CDR3 | RQSLVAGGDPRGQS | 1793 |
| | EYDY | |
| 01E05R2 Chothia CDR1 | GRAFSSG | 1794 |
| 01E05R2 Chothia CDR2 | SWSGHTTY | 1795 |
| 01E05R2 Chothia CDR3 | RQSLVAGGDPRGQSEYD | 1796 |
| 01E05R2 IMGT CDR1 | GRAFSSGR | 1797 |
| 01E05R2 IMGT CDR2 | ISWSGHTTYK | 1798 |
| 01E05R2 IMGT CDR3 | AARQSLVAGGDPRG | 1799 |
| | QSEYDY | |
| 01E05R2 Contact CDR1 | SSGRMG | 1800 |
| 01E05R2 Contact CDR2 | FVAAISWSGHTTYKY | 1801 |
| 01E05R2 Contact CDR3 | AARQSLVAGGDPRG | 1802 |
| | QSEYD | |
| 01A09R2 AbM CDR1 | GRTFSSNPMG | 1803 |
| 01A09R2 AbM CDR2 | AISWSGGGTY | 1804 |
| 01A09R2 AbM CDR3 | RDYSDPISLWVED | 1805 |
| | REYDY | |
| 01A09R2 Kabat CDR1 | SNPMG | 1806 |
| 01A09R2 Kabat CDR2 | AISWSGGGTYYAD | 1807 |
| | SVKG | |
| 01A09R2 Kabat CDR3 | RDYSDPISLWVED | 1808 |
| | REYDY | |
| 01A09R2 Chothia CDR1 | GRTFSSN | 1809 |
| 01A09R2 Chothia CDR2 | SWSGGG | 1810 |
| 01A09R2 Chothia CDR3 | RDYSDPISLWVED | 1811 |
| | REYD | |
| 01A09R2 IMGT CDR1 | GRTFSSNP | 1812 |
| 01A09R2 IMGT CDR2 | ISWSGGGT | 1813 |
| 01A09R2 IMGT CDR3 | ASRDYSDPISLWVE | 1814 |
| | DREYDY | |
| 01A09R2 Contact CDR1 | SSNPMG | 1815 |
| 01A09R2 Contact CDR2 | FVAAISWSGGGTY | 1816 |
| 01A09R2 Contact CDR3 | ASRDYSDPISLWV | 1817 |
| | EDREYD | |
| 01D06R2 AbM CDR1 | GRTLSFDTYAMA | 1818 |
| 01D06R2 AbM CDR2 | SIDWNGVNTY | 1819 |
| 01D06R2 AbM CDR3 | AQYYRSGTSFPANS | 1820 |
| 01D06R2 Kabat CDR1 | FDTYAMA | 1821 |
| 01D06R2 Kabat CDR2 | SIDWNGVNTYYADSVKG | 1822 |
| 01D06R2 Kabat CDR3 | AQYYRSGTSFPANS | 1823 |
| 01D06R2 Chothia CDR1 | GRTLSFDTY | 1824 |
| 01D06R2 Chothia CDR2 | DWNGVN | 1825 |
| 01D06R2 Chothia CDR3 | AQYYRSGTSFPAN | 1826 |
| 01D06R2 IMGT CDR1 | GRTLSFDTYA | 1827 |
| 01D06R2 IMGT CDR2 | IDWNGVNT | 1828 |
| 01D06R2 IMGT CDR3 | AAAQYYRSGTSFPANS | 1829 |
| 01D06R2 Contact CDR1 | SFDTYAMA | 1830 |
| 01D06R2 Contact CDR2 | FVASIDWNGVNTY | 1831 |
| 01D06R2 Contact CDR3 | AAAQYYRSGTSFPAN | 1832 |
| 02F10R3 AbM CDR1 | GSFFSLRDMG | 1833 |
| 02F10R3 AbM CDR2 | IFTRGGTTY | 1834 |
| 02F10R3 AbM CDR3 | EIRQYSANLYRDF | 1835 |
| 02F10R3 Kabat CDR1 | LRDMG | 1836 |
| 02F10R3 Kabat CDR2 | IFTRGGTTYYADSVKG | 1837 |
| 02F10R3 Kabat CDR3 | EIRQYSANLYRDF | 1838 |
| 02F10R3 Chothia CDR1 | GSFFSLR | 1839 |
| 02F10R3 Chothia CDR2 | TRGGT | 1840 |
| 02F10R3 Chothia CDR3 | EIRQYSANLYRD | 1841 |
| 02F10R3 IMGT CDR1 | GSFFSLRD | 1842 |
| 02F10R3 IMGT CDR2 | FTRGGTT | 1843 |
| 02F10R3 IMGT CDR3 | NAEIRQYSANLYRDF | 1844 |
| 02F10R3 Contact CDR1 | SLRDMG | 1845 |
| 02F10R3 Contact CDR2 | LVGIFTRGGTTY | 1846 |
| 02F10R3 Contact CDR3 | NAEIRQYSANLYRD | 1847 |
| 02H04R3 AbM CDR1 | GSIFSIRDMG | 1848 |
| 02H04R3 AbM CDR2 | IFARGGSTH | 1849 |
| 02H04R3 AbM CDR3 | EVATMIQPGFRDY | 1850 |
| 02H04R3 Kabat CDR1 | IRDMG | 1851 |
| 02H04R3 Kabat CDR2 | IFARGGSTHYADSVKG | 1852 |
| 02H04R3 Kabat CDR3 | EVATMIQPGFRDY | 1853 |
| 02H04R3 Chothia CDR1 | GSIFSIR | 1854 |
| 02H04R3 Chothia CDR2 | ARGGS | 1855 |
| 02H04R3 Chothia CDR3 | EVATMIQPGFRD | 1856 |
| 02H04R3 IMGT CDR1 | GSIFSIRD | 1857 |
| 02H04R3 IMGT CDR2 | FARGGST | 1858 |
| 02H04R3 IMGT CDR3 | NAEVATMIQPGFRDY | 1859 |
| 02H04R3 Contact CDR1 | SIRDMG | 1860 |
| 02H04R3 Contact CDR2 | LVAIFARGGSTH | 1861 |
| 02H04R3 Contact CDR3 | NAEVATMIQPGFRD | 1862 |
| 01G04R3 AbM CDR1 | GRTFSVYGMG | 1863 |
| 01G04R3 AbM CDR2 | AISWSDGSTY | 1864 |
| 01G04R3 AbM CDR3 | DLTGWGLDADVSEYDY | 1865 |
| 01G04R3 Kabat CDR1 | VYGMG | 1866 |
| 01G04R3 Kabat CDR2 | AISWSDGSTYYADSVKG | 1867 |
| 01G04R3 Kabat CDR3 | DLTGWGLDADVSEYDY | 1868 |
| 01G04R3 Chothia CDR1 | GRTFSVY | 1869 |
| 01G04R3 Chothia CDR2 | SWSDGS | 1870 |
| 01G04R3 Chothia CDR3 | DLTGWGLDADVSEYD | 1871 |
| 01G04R3 IMGT CDR1 | GRTFSVYG | 1872 |
| 01G04R3 IMGT CDR2 | ISWSDGST | 1873 |
| 01G04R3 IMGT CDR3 | AADLTGWGLDADVSEYDY | 1874 |
| 01G04R3 Contact CDR1 | SVYGMG | 1875 |
| 01G04R3 Contact CDR2 | FVAAISWSDGSTY | 1876 |
| 01G04R3 Contact CDR3 | AADLTGWGLDADVSEYD | 1877 |
| 01B01R3 AbM CDR1 | GRTFSSYAMG | 1878 |
| 01B01R3 AbM CDR2 | VISWSGGSTY | 1879 |
| 01B01R3 AbM CDR3 | GEQPGSNRPYIPEQPIEF | 1880 |
| | MPTDYPSWYDY | |
| 01B01R3 Kabat CDR1 | SYAMG | 1881 |
| 01B01R3 Kabat CDR2 | VISWSGGSTYYADSVKG | 1882 |
| 01B01R3 Kabat CDR3 | GEQPGSNRPYIPEQPI | 1883 |
| | EFMPTDYPSWYDY | |
| 01B01R3 Chothia CDR1 | GRTFSSY | 1884 |
| 01B01R3 Chothia CDR2 | SWSGGS | 1885 |
| 01B01R3 Chothia CDR3 | GEQPGSNRPYIPEQPI | 1886 |
| | EFMPTDYPSWYD | |
| 01B01R3 IMGT CDR1 | GRTFSSYA | 1887 |
| 01B01R3 IMGT CDR2 | ISWSGGST | 1888 |
| 01B01R3 IMGT CDR3 | ASGEQPGSNRPYIPEQ | 1889 |
| | PIEFMPTDYPSWYDY | |
| 01B01R3 Contact CDR1 | SSYAMG | 1890 |
| 01B01R3 Contact CDR2 | FVAVISWSGGSTY | 1891 |
| 01B01R3 Contact CDR3 | ASGEQPGSNRPYIPEQP | 1892 |
| | IEFMPTDYPSWYD | |
| 03H04R3 AbM CDR1 | GPTTSTFAMG | 1893 |
| 03H04R3 AbM CDR2 | AISWTGWATY | 1894 |
| 03H04R3 AbM CDR3 | HPDSDPIGLSGYDY | 1895 |
| 03H04R3 Kabat CDR1 | TFAMG | 1896 |
| 03H04R3 Kabat CDR2 | AISWTGWATYYPDSVKG | 1897 |
| 03H04R3 Kabat CDR3 | HPDSDPIGLSGYDY | 1898 |
| 03H04R3 Chothia CDR1 | GPTTSTF | 1899 |
| 03H04R3 Chothia CDR2 | SWTGWA | 1900 |
| 03H04R3 Chothia CDR3 | HPDSDPIGLSGYD | 1901 |
| 03H04R3 IMGT CDR1 | GPTTSTFA | 1902 |
| 03H04R3 IMGT CDR2 | ISWTGWAT | 1903 |
| 03H04R3 IMGT CDR3 | AFHPDSDPIGLSGYDY | 1904 |
| 03H04R3 Contact CDR1 | STFAMG | 1905 |
| 03H04R3 Contact CDR2 | IVAAISWTGWATY | 1906 |
| 03H04R3 Contact CDR3 | AFHPDSDPIGLSGYD | 1907 |
| 01C03R2L AbM CDR1 | GRTLRSYIVG | 1908 |
| 01C03R2L AbM CDR2 | AVTWSDGRRV | 1909 |
| 01C03R2L AbM CDR3 | SHGGAYVESRAYEY | 1910 |
| 01C03R2L Kabat CDR1 | SYIVG | 1911 |
| 01C03R2L Kabat CDR2 | AVTWSDGRRVTADPVKG | 1912 |
| 01C03R2L Kabat CDR3 | SHGGAYVESRAYEY | 1913 |
| 01C03R2L Chothia CDR1 | GRTLRSY | 1914 |
| 01C03R2L Chothia CDR2 | TWSDGR | 1915 |
| 01C03R2L Chothia CDR3 | SHGGAYVESRAYE | 1916 |
| 01C03R2L IMGT CDR1 | GRTLRSYI | 1917 |
| 01C03R2L IMGT CDR2 | VTWSDGRR | 1918 |
| 01C03R2L IMGT CDR3 | AVSHGGAYVESRAYEY | 1919 |
| 01C03R2L Contact CDR1 | RSYIVG | 1920 |
| 01C03R2L Contact CDR2 | FVAAVTWSDGRRV | 1921 |
| 01C03R2L Contact CDR3 | AVSHGGAYVESRAYE | 1922 |
| 01E09R3LS AbM CDR1 | GRTINTYVMG | 1923 |
| 01E09R3LS AbM CDR2 | RIDWSGSSTD | 1924 |
| 01E09R3LS AbM CDR3 | SAYYSGYVTHRDFGS | 1925 |
| 01E09R3LS Kabat CDR1 | TYVMG | 1926 |
| 01E09R3LS Kabat CDR2 | RIDWSGSSTDYADSVKG | 1927 |
| 01E09R3LS Kabat CDR3 | SAYYSGYVTHRDFGS | 1928 |
| 01E09R3LS Chothia CDR1 | GRTINTY | 1929 |
| 01E09R3LS Chothia CDR2 | DWSGSS | 1930 |
| 01E09R3LS Chothia CDR3 | SAYYSGYVTHRDFG | 1931 |
| 01E09R3LS IMGT CDR1 | GRTINTYV | 1932 |
| 01E09R3LS IMGT CDR2 | IDWSGSST | 1933 |
| 01E09R3LS IMGT CDR3 | AGSAYYSGYVTHRDFGS | 1934 |
| 01E09R3LS Contact CDR1 | NTYVMG | 1935 |
| 01E09R3LS Contact CDR2 | FVARIDWSGSSTD | 1936 |
| 01E09R3LS Contact CDR3 | AGSAYYSGYVTHRDFG | 1937 |
| 03C10R3 AbM CDR1 | GRSLGFDTYAMG | 1938 |
| 03C10R3 AbM CDR2 | SIDWNGGNTY | 1939 |
| 03C10R3 AbM CDR3 | ARYYTSGTYFPANY | 1940 |
| 03C10R3 Kabat CDR1 | FDTYAMG | 1941 |
| 03C10R3 Kabat CDR2 | SIDWNGGNTYYADSVKG | 1942 |
| 03C10R3 Kabat CDR3 | ARYYTSGTYFPANY | 1943 |
| 03C10R3 Chothia CDR1 | GRSLGFDTY | 1944 |
| 03C10R3 Chothia CDR2 | DWNGGN | 1945 |
| 03C10R3 Chothia CDR3 | ARYYTSGTYFPAN | 1946 |
| 03C10R3 IMGT CDR1 | GRSLGFDTYA | 1947 |
| 03C10R3 IMGT CDR2 | IDWNGGNT | 1948 |
| 03C10R3 IMGT CDR3 | AAARYYTSGTYFPANY | 1949 |
| 03C10R3 Contact CDR1 | GFDTYAMG | 1950 |
| 03C10R3 Contact CDR2 | FVASIDWNGGNTY | 1951 |
| 03C10R3 Contact CDR3 | AAARYYTSGTYFPAN | 1952 |

TABLE 5C
Sequence Listing Table

| | | SEQ |
|---|---|---|
| | | ID |
| Name | Sequence | NO. |
| IgA Heavy | QVQLVQSGAEVKKPGSSVKV | 1953 |
| Chain | SCKSSGGTSNNYAISWVRQA | |
| | PGQGLDWMGGISPIFGSTAY | |
| | AQKFQGRVTISADIFSNTAY | |
| | MELNSLTSEDTAVYFCARHG | |
| | NYYYYSGMDVWGQGTTVTVS | |
| | SASPTSPKVFPLSLDSTPQD | |
| | GNVVVACLVQGFFPQEPLSV | |
| | TWSESGONVTARNFPPSODA | |
| | SGDLYTTSSQLTLPATQCPD | |
| | GKSVTCHVKHYTNPSQDVTV | |
| | PCPVPPPPPCCHPRLSLHRP | |
| | ALEDLLLGSEANLTCTLTGL | |
| | RDASGATFTWTPSSGKSAVQ | |
| | GPPERDLCGCYSVSSVLPGC | |
| | AQPWNHGETFTCTAAHPELK | |
| | TPLTANITKSGNTFRPEVHL | |
| | LPPPSEELALNELVTLTCLA | |
| | RGFSPKDVLVRWLQGSQELP | |
| | REKYLTWASRQEPSQGTTTF | |
| | AVTSILRVAAEDWKKGDTFS | |
| | CMVGHEALPLAFTQKTIDRL | |
| | AGKPTHVNVSVVMAEVDGTC | |
| | Y | |
| IgA Light | QSALTQPPAVSGTPGQRVTI | 1954 |
| Chain | SCSGSDSNIGRRSVNWYQQF | |
| | PGTAPKLLIYSNDQRPSVVP | |
| | DRFSGSKSGTSASLAISGLQ | |
| | SEDEAEYYCAAWDDSLKGAV | |
| | FGGGTQLTVLGQPKAAPSVT | |
| | LFPPSSEELQANKATLVCLI | |
| | SDFYPGAVTVAWKADSSPVK | |
| | AGVETTTPSKQSNNKYAASS | |
| | YLSLTPEQWKSHRSYSCQVT | |
| | HEGSTVEKTVAPTECS | |
| IgA J Chain | SRDSSASASRVAGITAQEDE | 1955 |
| | RIVLVDNKCKCARITSRIIR | |
| | SSEDPNEDIVERNIRIIVPL | |
| | NNRENISDPTSPLRTRFVYH | |
| | LSDLCKKCDPTEVELDNQIV | |
| | TATQSNICDEDSATETCYTY | |
| | DRNKCYTAVVPLVYGGETKM | |
| | VETALTPDACYPD | |
| human pIgR | KSPIFGPEEVNSVEGNSVSI | 1956 |
| extracellular | TCYYPPTSVNRHTRKYWCRQ | |
| domain (ECD) | GARGGCITLISSEGYVSSKY | |
| | AGRANLTNFPENGTFVVNIA | |
| | QLSQDDSGRYKCGLGINSRG | |
| | LSFDVSLEVSQGPGLLNDTK | |
| | VYTVDLGRTVTINCPFKTEN | |
| | AQKRKSLYKQIGLYPVLVID | |
| | SSGYVNPNYTGRIRLDIQGT | |
| | GQLLFSVVINQLRLSDAGQY | |
| | LCQAGDDSNSNKKNADLQVL | |
| | KPEPELVYEDLRGSVTFHCA | |
| | LGPEVANVAKFLCRQSSGEN | |
| | CDVVVNTLGKRAPAFEGRIL | |
| | LNPQDKDGSFSVVITGLRKE | |
| | DAGRYLCGAHSDGOLQEGSP | |
| | IQAWQLFVNEESTIPRSPTV | |
| | VKGVAGSSVAVLCPYNRKES | |
| | KSIKYWCLWEGAQNGRCPLL | |
| | VDSEGWVKAQYEGRLSLLEE | |
| | PGNGTFTVILNQLTSRDAGF | |
| | YWCLTNGDTLWRTTVEIKII | |
| | EGEPNLKVPGNVTAVLGETL | |
| | KVPCHFPCKFSSYEKYWCKW | |
| | NNTGCQALPSQDEGPSKAFV | |
| | NCDENSRLVSLTLNLVTRAD | |
| | EGWYWCGVKQGHFYGETAAV | |
| | YVAVEERKAAGSRDVSLAKA | |
| | DAAPDEKVLDSGFREIENKA | |
| | IQDPRLFAEEKAVADTRDQA | |
| | DGSRASVDSGSSEEQGGSSR | |
| | HHHHHH | |
| human pIgR | KSPIFGPEEVNSVEGNSVSI | 1957 |
| extracellular | TCYYPPTSVNRHTRKYWCRQ | |
| domain 1 (Dl) | GARGGCITLISSEGYVSSKY | |
| | AGRANLTNFPENGTFVVNIA | |
| | QLSQDDSGRYKCGLGINSRG | |
| | LSFDVSLEVGSHHHHHH | |
| human pIgR | SQGPGLLNDTKVYTVDLGRT | 1958 |
| extracellular | WINCPFKTENAQKRKSLYKQ | |
| domain 2 (D2) | IGLYPVLVIDSSGYVNPNYT | |
| | GRIRLDIQGTGQLLFSVVIN | |
| | QLRLSDAGQYLCQAGDDSNS | |
| | NKKNADLQVLKPEPGSHHHH | |
| | HH | |
| human pIgR | KPEPELVYEDLRGSVTFHCA | 1959 |
| extracellular | LGPEVANVAKFLCRQSSGEN | |
| domain 3 (D3) | CDVVVNTLGKRAPAFEGRIL | |
| | LNPQDKDGSFSVVITGLRKE | |
| | DAGRYLCGAHSDGOLQEGSP | |
| | IQAWQLFVNEESTGSHHHHH | |
| | H | |
| human pIgR | GEPNLKVPGNVTAVLGETLK | 1960 |
| extracellular | VPCHFPCKFSSYEKYWCKWN | |
| domain 5 (D5) | NTGCQALPSQDEGPSKAFVN | |
| | CDENSRLVSLTLNLVTRADE | |
| | GWYWCGVKQGHFYGETAAVY | |
| | VAVEERGSHHHHHH | |
| human pIgR | KSPIFGPEEVNSVEGNSVSI | 1961 |
| extracellular | TCYYPPTSVNRHTRKYWCRQ | |
| domain 1- | GARGGCITLISSEGYVSSKY | |
| domain 2 (D1 - | AGRANLTNFPENGTFVVNIA | |
| D2) | QLSQDDSGRYKCGLGINSRG | |
| | LSFDVSLEVSQGPGLLNDTK | |
| | VYTVDLGRTVTINCPFKTEN | |
| | AQKRKSLYKQIGLYPVLVID | |
| | SSGYVNPNYTGRIRLDIQGT | |
| | GQLLFSVVINQLRLSDAGQY | |
| | LCQAGDDSNSNKKNADLQVL | |
| | KPGSHHHHHH | |
| human pIgR | SQGPGLLNDTKVYTVDLGRT | 1962 |
| extracellular | VTINCPFKTENAQKRKSLYK | |
| domain 2- | QIGLYPVLVIDSSGYVNPNY | |
| domain 3 (D2- | TGRIRLDIQGTGQLLFSVVI | |
| D3) | NQLRLSDAGQYLCQAGDDSN | |
| | SNKKNADLQVLKPEPELVYE | |
| | DLRGSVTFHCALGPEVANVA | |
| | KFLCRQSSGENCDVVVNTLG | |
| | KRAPAFEGRILLNPODKDGS | |
| | FSWITGLRKEDAGRYLCGAH | |
| | SDGOLOEGSPIOAWOLFVNG | |
| | SHHHHHH | |
| human pIgR | STIPRSPTWKGVAGSSVAVL | 1963 |
| extracellular | CPYNRKESKSIKYWCLWEGA | |
| domain 4- | QNGRCPLLVDSEGWVKAQYE | |
| domain 5 (D4- | GRLSLLEEPGNGTFTVILNQ | |
| D5) | LTSRDAGFYWCLTNGDTLWR | |
| | TTVEIKIIEGEPNLKVPGNV | |
| | TAVLGETLKVPCHFPCKFSS | |
| | YEKYWCKWNNTGCQALPSQD | |
| | EGPSKAFVNCDENSRLVSLT | |
| | LNLVTRADEGWYWCGVKQGH | |
| | FYGETAAVYVAVEERGSHHH | |
| | HHH | |
| Exemplary | EKAVADTRDQADGSRASVDS | 1964 |
| stalk sequence | GSSEEQGGSSR | |
| of human pIgR | | |
| Exemplary | EREIQNVGDQAQENRASGDA | 1965 |
| stalk sequence | GSADGQSRSSSSK | |
| of mounse pIgR | | |
| Exemplary | EREIQNVRDQAQENRASGDA | 1966 |
| stalk sequence | GSADGQSRSSSSK | |
| of mounse pIgR | | |
| Exemplary | (EAAAK)n, | 1967 |
| Flexible | wherein n is an | |
| liner 1 | integer from 1 to 20 | |
| Exemplary | (GGGGS)n, | 1968 |
| Flexible | wherein n is an | |
| liner 2 | integer from 1 to 20 | |
| Exemplary | (GGGS)n, | 1969 |
| Flexible | wherein n is an | |
| liner 3 | integer from 1 to 20 | |
| Exemplary | EPKSCDKTHTCPPCP | 1970 |
| Hinge | | |
| region 1 | | |
| Exemplary | ERKCCVECPPCP | 1971 |
| Hinge | | |
| region 2 | | |
| Exemplary | ELKTPLGDTTHTCPRCP | 1972 |
| Hinge | (EPKSCDTPPPCPRCP)₃ | |
| region 3 | | |
| Exemplary | ESKYGPPCPSCP | 1973 |
| Hinge | | |
| region 4 | | |
| pIgR CDR1 | GPQYASY | 1974 |
| of D1 | | |
| pIgR CDR2 | DAP | 1975 |
| of D1 | | |
| pIgR CDR3 | VGGVWSAD | 1976 |
| of D1 | | |
| mouse pIgR | KSPIFGPQEVSSIEGDSVSI | 1977 |
| extracellular | TCYYPDTSVNRHTRKYWCRQ | |
| domain (ECD) | GASGMCTTLISSNGYLSKEY | |
| | SGRANLINFPENNTFVINIE | |
| | QLTQDDTGSYKCGLGTSNRG | |
| | LSFDVSLEVSQVPELPSDTH | |
| | VYTKDIGRNVTIECPFKREN | |
| | APSKKSLCKKTNQSCELVID | |
| | STEKVNPSYIGRAKLFMKGT | |
| | DLTVFYVNISHLTHNDAGLY | |
| | ICQAGEGPSADKKNVDLQVL | |
| | APEPELLYKDLRSSVTFECD | |
| | LGREVANEAKYLCRMNKETC | |
| | DVIINTLGKRDPDFEGRILI | |
| | TPKDDNGRFSVLITGLRKED | |
| | AGHYQCGAHSSGLPQEGWPI | |
| | QTWQLFVNEESTIPNRRSVV | |
| | KGVTGGSVAIACPYNPKESS | |
| | SLKYWCRWEGDGNGHCPVLV | |
| | GTQAQVQEEYEGRLALFDQP | |
| | GNGTYTVILNQLTTEDAGFY | |
| | YVCLTNGDSRWRTTIELQVA | |
| | EATREPNLEVTPQNATAVLG | |
| | ETFTVSCHYPCKFYSQEKYW | |
| | CKWSNKGCHILPSHDEGARQ | |
| | SSVSCDQSSQLVSMTLNPVS | |
| | KEDEGWYWCGVKQGQTYGET | |
| | TAIYIAVEERTRGSSHVNPT | |
| | DANARAKVALEEEVVDSSIS | |
| | EKENKAIPNPGPFANEREIQ | |
| | NVGDQAQENRASGDAGSADG | |
| | QSRSSSSKHHHHHH | |
| hinge region | EPKTPKPQPQPQLQPQPNPT | 1978 |
| (AA) | TESKSPK | |
| hinge region | GAACCCAAGACACCAAAACC | 1979 |
| (DNA) | ACAACCACAACCACAACTAC | |
| | AACCACAACCCAATCCTACA | |
| | ACAGAATCCAAGAGCCCCAA | |
| | AA | |
| Human IgG1 | AGCCCAGCACCTGAACTCCT | 1980 |
| Mono-Fc | GGGGGGACCGTCAGTCTTCC | |
| DNA sequence | TCTTCCCCCCAAAACCCAAG | |
| | GACACCCTCATGATCTCCCG | |
| | GACCCCTGAGGTCACATGCG | |
| | TGGTGGTGGACGTGAGCCAC | |
| | GAAGACCCTGAGGTCAAGTT | |
| | CAACTGGTACGTGGACGGCG | |
| | TGGAGGTGCATAATGCCAAG | |
| | ACAAAGCCGCGGGAGGAGCA | |
| | GTACAACAGCACGTACCGTG | |
| | TGGTCAGCGTCCTCACCGTC | |
| | CTGCACCAGGACTGGCTGAA | |
| | TGGCAAGGAGTACAAGTGCA | |
| | AGGTCTCCAACAAAGCCCTC | |
| | CCAGCCCCCATCGAGAAAAC | |
| | CATCTCCAAAGCCAAAGGGC | |
| | AGCCCCGAGAACCACAGGTG | |
| | TACACCAAGCCCCCATCCCG | |
| | GGAGGAGATGACCAAGAACC | |
| | AGGTCAGCCTGAGCTGCCTG | |
| | GTCAAAGGCTTCTATCCCAG | |
| | CGACATCGCCGTGGAGTGGG | |
| | AGAGCAATGGGCAGCCGGAG | |
| | AACAACTACAAGACCACGGT | |
| | GCCCGTGCTGGACTCCGACG | |
| | GCTCCTTCAGACTCGCAAGC | |
| | TATCTCACCGTGGACAAGAG | |
| | CAGATGGCAGCAGGGGAACG | |
| | TCTTCTCATGCTCCGTGATG | |
| | CATGAGGCTCTGCACAACCA | |
| | CTACACGCAGAAGAGCCTCT | |
| | CCCTGTCTCCGGGTAAA | |
| Human IgG1 | SPAPELLGGPSVFLFPPKPK | 1981 |
| Mono-Fc AA | DTLMISRTPEVTCVVVDVSH | |
| sequence | EDPEVKFNWYVDGVEVHNAK | |
| | TKPREEOYNSTYRVVSVLTV | |
| | LHQDWLNGKEYKCKVSNKAL | |
| | PAPIEKTISKAKGQPREPQV | |
| | YTKPPSREEMTKNQVSLSCL | |
| | VKGFYPSDIAVEWESNGQPE | |
| | NNYKTTVPVLDSDGSFRLAS | |
| | YLTVDKSRWQQGNVFSCSVM | |
| | HEALHNHYTQKSLSLSPGK | |

[0635] It will be appreciated by those skilled in the art that changes could be made to the embodiments described above without departing from the broad inventive concept thereof. It is understood, therefore, that this invention is not limited to the particular embodiments disclosed, but it is intended to cover modifications within the spirit and scope of the present invention as defined by the present description.

1. A single domain antibody that binds to an extracellular domain of polymeric immunoglobulin receptor (pIgR);
optionally wherein
(A) (1) the single domain antibody binds to an extracellular domain 1 of pIgR; (2) the single domain antibody binds to an extracellular domain 2 of pIgR; (3) the single domain antibody binds to an extracellular domain 1-2 of pIgR; (4) the single domain antibody binds to an extracellular domain 3 of pIgR, (5) the single domain antibody binds to an extracellular domain 2-3 of pIgR; (6) the single domain antibody binds to an extracellular domain 4-5 of pIgR; or (7) the single domain antibody binds to an extracellular domain 5 of pIgR;
(B) pIgR is human pIgR or mouse pIgR;
(C) (1) the single domain antibody does not detectably bind to the amino acid sequence of EKAVADTRDQADGSRASVDSGSSEEQGGSSR (SEQ ID NO: 1964), EREIQNVGDQAQENRASGDAGSADGQSRSSSSK (SEQ ID NO: 1965), or EREIQNVRDQAQENRASGDAGSADGQSRSSSSK (SEQ ID NO: 1966); (2) the single domain antibody competes with IgA binding to the pIgR; or (3) the single domain antibody promotes IgA binding to the pIgR;
(D) (1) the K_{D} of the binding of the single domain antibody to pIgR is from about 4 to about 525 nM, is less than about 50 nM or is from about 4 to about 34 nM; or (2) the Tₘ of the single domain antibody is from about 53 to about 77° C. or is from 53.9 to 76.4° C.;
(E) the single domain antibody comprises (1) a CDR3 sequence set forth in any of SEQ ID NOs: 1 to 122; (2) a CDR2 sequence set forth in any of SEQ ID NOs: 1 to 122; and/or (3) a CDR1 sequence set forth in any of SEQ ID NOs: 1 to 122;
(F) the single domain antibody comprises:
(1) a CDR1 comprising an amino acid sequence of SEQ ID NO: 123; a CDR2 comprising an amino acid sequence of SEQ ID NO: 124; and a CDR3 comprising an amino acid sequence of SEQ ID NO: 125;
(2) a CDR1 comprising an amino acid sequence of SEQ ID NO: 126; a CDR2 comprising an amino acid sequence of SEQ ID NO: 127; and a CDR3 comprising an amino acid sequence of SEQ ID NO: 128;
(3) a CDR1 comprising an amino acid sequence of SEQ ID NO: 129; a CDR2 comprising an amino acid sequence of SEQ ID NO: 130; and a CDR3 comprising an amino acid sequence of SEQ ID NO: 131;
(4) a CDR1 comprising an amino acid sequence of SEQ ID NO: 132; a CDR2 comprising an amino acid sequence of SEQ ID NO: 133; and a CDR3 comprising an amino acid sequence of SEQ ID NO: 134;
(5) a CDR1 comprising an amino acid sequence of SEQ ID NO: 135; a CDR2 comprising an amino acid sequence of SEQ ID NO: 136; and a CDR3 comprising an amino acid sequence of SEQ ID NO: 137;
(6) a CDR1 comprising an amino acid sequence of SEQ ID NO: 138; a CDR2 comprising an amino acid sequence of SEQ ID NO: 139; and a CDR3 comprising an amino acid sequence of SEQ ID NO: 140;
(7) a CDR1 comprising an amino acid sequence of SEQ ID NO: 141; a CDR2 comprising an amino acid sequence of SEQ ID NO: 142; and a CDR3 comprising an amino acid sequence of SEQ ID NO: 143;
(8) a CDR1 comprising an amino acid sequence of SEQ ID NO: 144; a CDR2 comprising an amino acid sequence of SEQ ID NO: 145; and a CDR3 comprising an amino acid sequence of SEQ ID NO: 146;
(9) a CDR1 comprising an amino acid sequence of SEQ ID NO: 147; a CDR2 comprising an amino acid sequence of SEQ ID NO: 148; and a CDR3 comprising an amino acid sequence of SEQ ID NO: 149;
(10) a CDR1 comprising an amino acid sequence of SEQ ID NO: 150; a CDR2 comprising an amino acid sequence of SEQ ID NO: 151; and a CDR3 comprising an amino acid sequence of SEQ ID NO: 152;
(11) a CDR1 comprising an amino acid sequence of SEQ ID NO: 153; a CDR2 comprising an amino acid sequence of SEQ ID NO: 154; and a CDR3 comprising an amino acid sequence of SEQ ID NO: 155;
(12) a CDR1 comprising an amino acid sequence of SEQ ID NO: 156; a CDR2 comprising an amino acid sequence of SEQ ID NO: 157; and a CDR3 comprising an amino acid sequence of SEQ ID NO: 158;
(13) a CDR1 comprising an amino acid sequence of SEQ ID NO: 159; a CDR2 comprising an amino acid sequence of SEQ ID NO: 160; and a CDR3 comprising an amino acid sequence of SEQ ID NO: 161;
(14) a CDR1 comprising an amino acid sequence of SEQ ID NO: 162; a CDR2 comprising an amino acid sequence of SEQ ID NO: 163; and a CDR3 comprising an amino acid sequence of SEQ ID NO: 164;
(15) a CDR1 comprising an amino acid sequence of SEQ ID NO: 165; a CDR2 comprising an amino acid sequence of SEQ ID NO: 166; and a CDR3 comprising an amino acid sequence of SEQ ID NO: 167;
(16) a CDR1 comprising an amino acid sequence of SEQ ID NO: 168; a CDR2 comprising an amino acid sequence of SEQ ID NO: 169; and a CDR3 comprising an amino acid sequence of SEQ ID NO: 170;
(17) a CDR1 comprising an amino acid sequence of SEQ ID NO: 171; a CDR2 comprising an amino acid sequence of SEQ ID NO: 172; and a CDR3 comprising an amino acid sequence of SEQ ID NO: 173;
(18) a CDR1 comprising an amino acid sequence of SEQ ID NO: 174; a CDR2 comprising an amino acid sequence of SEQ ID NO: 175; and a CDR3 comprising an amino acid sequence of SEQ ID NO: 176;
(19) a CDR1 comprising an amino acid sequence of SEQ ID NO: 177; a CDR2 comprising an amino acid sequence of SEQ ID NO: 178; and a CDR3 comprising an amino acid sequence of SEQ ID NO: 179;
(20) a CDR1 comprising an amino acid sequence of SEQ ID NO: 180; a CDR2 comprising an amino acid sequence of SEQ ID NO: 181; and a CDR3 comprising an amino acid sequence of SEQ ID NO: 182;
(21) a CDR1 comprising an amino acid sequence of SEQ ID NO: 183; a CDR2 comprising an amino acid sequence of SEQ ID NO: 184; and a CDR3 comprising an amino acid sequence of SEQ ID NO: 185;
(22) a CDR1 comprising an amino acid sequence of SEQ ID NO: 186; a CDR2 comprising an amino acid sequence of SEQ ID NO: 187; and a CDR3 comprising an amino acid sequence of SEQ ID NO: 188;
(23) a CDR1 comprising an amino acid sequence of SEQ ID NO: 189; a CDR2 comprising an amino acid sequence of SEQ ID NO: 190; and a CDR3 comprising an amino acid sequence of SEQ ID NO: 191;
(24) a CDR1 comprising an amino acid sequence of SEQ ID NO: 192; a CDR2 comprising an amino acid sequence of SEQ ID NO: 193; and a CDR3 comprising an amino acid sequence of SEQ ID NO: 194;
(25) a CDR1 comprising an amino acid sequence of SEQ ID NO: 195; a CDR2 comprising an amino acid sequence of SEQ ID NO: 196; and a CDR3 comprising an amino acid sequence of SEQ ID NO: 197;
(26) a CDR1 comprising an amino acid sequence of SEQ ID NO: 198; a CDR2 comprising an amino acid sequence of SEQ ID NO: 199; and a CDR3 comprising an amino acid sequence of SEQ ID NO: 200;
(27) a CDR1 comprising an amino acid sequence of SEQ ID NO: 201; a CDR2 comprising an amino acid sequence of SEQ ID NO: 202; and a CDR3 comprising an amino acid sequence of SEQ ID NO: 203;
(28) a CDR1 comprising an amino acid sequence of SEQ ID NO: 204; a CDR2 comprising an amino acid sequence of SEQ ID NO: 205; and a CDR3 comprising an amino acid sequence of SEQ ID NO: 206;
(29) a CDR1 comprising an amino acid sequence of SEQ ID NO: 207; a CDR2 comprising an amino acid sequence of SEQ ID NO: 208; and a CDR3 comprising an amino acid sequence of SEQ ID NO: 209;
(30) a CDR1 comprising an amino acid sequence of SEQ ID NO: 210; a CDR2 comprising an amino acid sequence of SEQ ID NO: 211; and a CDR3 comprising an amino acid sequence of SEQ ID NO: 212;
(31) a CDR1 comprising an amino acid sequence of SEQ ID NO: 213; a CDR2 comprising an amino acid sequence of SEQ ID NO: 214; and a CDR3 comprising an amino acid sequence of SEQ ID NO: 215;
(32) a CDR1 comprising an amino acid sequence of SEQ ID NO: 216; a CDR2 comprising an amino acid sequence of SEQ ID NO: 217; and a CDR3 comprising an amino acid sequence of SEQ ID NO: 218;
(33) a CDR1 comprising an amino acid sequence of SEQ ID NO: 219; a CDR2 comprising an amino acid sequence of SEQ ID NO: 220; and a CDR3 comprising an amino acid sequence of SEQ ID NO: 221;
(34) a CDR1 comprising an amino acid sequence of SEQ ID NO: 222; a CDR2 comprising an amino acid sequence of SEQ ID NO: 223; and a CDR3 comprising an amino acid sequence of SEQ ID NO: 224;
(35) a CDR1 comprising an amino acid sequence of SEQ ID NO: 225; a CDR2 comprising an amino acid sequence of SEQ ID NO: 226; and a CDR3 comprising an amino acid sequence of SEQ ID NO: 227;
(36) a CDR1 comprising an amino acid sequence of SEQ ID NO: 228; a CDR2 comprising an amino acid sequence of SEQ ID NO: 229; and a CDR3 comprising an amino acid sequence of SEQ ID NO: 230;
(37) a CDR1 comprising an amino acid sequence of SEQ ID NO: 231; a CDR2 comprising an amino acid sequence of SEQ ID NO: 232; and a CDR3 comprising an amino acid sequence of SEQ ID NO: 233;
(38) a CDR1 comprising an amino acid sequence of SEQ ID NO: 234; a CDR2 comprising an amino acid sequence of SEQ ID NO: 235; and a CDR3 comprising an amino acid sequence of SEQ ID NO: 236;
(39) a CDR1 comprising an amino acid sequence of SEQ ID NO: 237; a CDR2 comprising an amino acid sequence of SEQ ID NO: 238; and a CDR3 comprising an amino acid sequence of SEQ ID NO: 239;
(40) a CDR1 comprising an amino acid sequence of SEQ ID NO: 240; a CDR2 comprising an amino acid sequence of SEQ ID NO: 241; and a CDR3 comprising an amino acid sequence of SEQ ID NO: 242;
(41) a CDR1 comprising an amino acid sequence of SEQ ID NO: 243; a CDR2 comprising an amino acid sequence of SEQ ID NO: 244; and a CDR3 comprising an amino acid sequence of SEQ ID NO: 245;
(42) a CDR1 comprising an amino acid sequence of SEQ ID NO: 246; a CDR2 comprising an amino acid sequence of SEQ ID NO: 247; and a CDR3 comprising an amino acid sequence of SEQ ID NO: 248;
(43) a CDR1 comprising an amino acid sequence of SEQ ID NO: 249; a CDR2 comprising an amino acid sequence of SEQ ID NO: 250; and a CDR3 comprising an amino acid sequence of SEQ ID NO: 251;
(44) a CDR1 comprising an amino acid sequence of SEQ ID NO: 252; a CDR2 comprising an amino acid sequence of SEQ ID NO: 253; and a CDR3 comprising an amino acid sequence of SEQ ID NO: 254;
(45) a CDR1 comprising an amino acid sequence of SEQ ID NO: 255; a CDR2 comprising an amino acid sequence of SEQ ID NO: 256; and a CDR3 comprising an amino acid sequence of SEQ ID NO: 257;
(46) a CDR1 comprising an amino acid sequence of SEQ ID NO: 258; a CDR2 comprising an amino acid sequence of SEQ ID NO: 259; and a CDR3 comprising an amino acid sequence of SEQ ID NO: 260;
(47) a CDR1 comprising an amino acid sequence of SEQ ID NO: 261; a CDR2 comprising an amino acid sequence of SEQ ID NO: 262; and a CDR3 comprising an amino acid sequence of SEQ ID NO: 263;
(48) a CDR1 comprising an amino acid sequence of SEQ ID NO: 264; a CDR2 comprising an amino acid sequence of SEQ ID NO: 265; and a CDR3 comprising an amino acid sequence of SEQ ID NO: 266;
(49) a CDR1 comprising an amino acid sequence of SEQ ID NO: 267; a CDR2 comprising an amino acid sequence of SEQ ID NO: 268; and a CDR3 comprising an amino acid sequence of SEQ ID NO: 269;
(50) a CDR1 comprising an amino acid sequence of SEQ ID NO: 270; a CDR2 comprising an amino acid sequence of SEQ ID NO: 271; and a CDR3 comprising an amino acid sequence of SEQ ID NO: 272;
(51) a CDR1 comprising an amino acid sequence of SEQ ID NO: 273; a CDR2 comprising an amino acid sequence of SEQ ID NO: 274; and a CDR3 comprising an amino acid sequence of SEQ ID NO: 275;
(52) a CDR1 comprising an amino acid sequence of SEQ ID NO: 276; a CDR2 comprising an amino acid sequence of SEQ ID NO: 277; and a CDR3 comprising an amino acid sequence of SEQ ID NO: 278;
(53) a CDR1 comprising an amino acid sequence of SEQ ID NO: 279; a CDR2 comprising an amino acid sequence of SEQ ID NO: 280; and a CDR3 comprising an amino acid sequence of SEQ ID NO: 281;
(54) a CDR1 comprising an amino acid sequence of SEQ ID NO: 282; a CDR2 comprising an amino acid sequence of SEQ ID NO: 283; and a CDR3 comprising an amino acid sequence of SEQ ID NO: 284;
(55) a CDR1 comprising an amino acid sequence of SEQ ID NO: 285; a CDR2 comprising an amino acid sequence of SEQ ID NO: 286; and a CDR3 comprising an amino acid sequence of SEQ ID NO: 287;
(56) a CDR1 comprising an amino acid sequence of SEQ ID NO: 288; a CDR2 comprising an amino acid sequence of SEQ ID NO: 289; and a CDR3 comprising an amino acid sequence of SEQ ID NO: 290;
(57) a CDR1 comprising an amino acid sequence of SEQ ID NO: 291; a CDR2 comprising an amino acid sequence of SEQ ID NO: 292; and a CDR3 comprising an amino acid sequence of SEQ ID NO: 293;
(58) a CDR1 comprising an amino acid sequence of SEQ ID NO: 294; a CDR2 comprising an amino acid sequence of SEQ ID NO: 295; and a CDR3 comprising an amino acid sequence of SEQ ID NO: 296;
(59) a CDR1 comprising an amino acid sequence of SEQ ID NO: 297; a CDR2 comprising an amino acid sequence of SEQ ID NO: 298; and a CDR3 comprising an amino acid sequence of SEQ ID NO: 299;
(60) a CDR1 comprising an amino acid sequence of SEQ ID NO: 300; a CDR2 comprising an amino acid sequence of SEQ ID NO: 301; and a CDR3 comprising an amino acid sequence of SEQ ID NO: 302;
(61) a CDR1 comprising an amino acid sequence of SEQ ID NO: 303; a CDR2 comprising an amino acid sequence of SEQ ID NO: 304; and a CDR3 comprising an amino acid sequence of SEQ ID NO: 305;
(62) a CDR1 comprising an amino acid sequence of SEQ ID NO: 306; a CDR2 comprising an amino acid sequence of SEQ ID NO: 307; and a CDR3 comprising an amino acid sequence of SEQ ID NO: 308;
(63) a CDR1 comprising an amino acid sequence of SEQ ID NO: 309; a CDR2 comprising an amino acid sequence of SEQ ID NO: 310; and a CDR3 comprising an amino acid sequence of SEQ ID NO: 311;
(64) a CDR1 comprising an amino acid sequence of SEQ ID NO: 312; a CDR2 comprising an amino acid sequence of SEQ ID NO: 313; and a CDR3 comprising an amino acid sequence of SEQ ID NO: 314;
(65) a CDR1 comprising an amino acid sequence of SEQ ID NO: 315; a CDR2 comprising an amino acid sequence of SEQ ID NO: 316; and a CDR3 comprising an amino acid sequence of SEQ ID NO: 317;
(66) a CDR1 comprising an amino acid sequence of SEQ ID NO: 318; a CDR2 comprising an amino acid sequence of SEQ ID NO: 319; and a CDR3 comprising an amino acid sequence of SEQ ID NO: 320;
(67) a CDR1 comprising an amino acid sequence of SEQ ID NO: 321; a CDR2 comprising an amino acid sequence of SEQ ID NO: 322; and a CDR3 comprising an amino acid sequence of SEQ ID NO: 323;
(68) a CDR1 comprising an amino acid sequence of SEQ ID NO: 324; a CDR2 comprising an amino acid sequence of SEQ ID NO: 325; and a CDR3 comprising an amino acid sequence of SEQ ID NO: 326;
(69) a CDR1 comprising an amino acid sequence of SEQ ID NO: 327; a CDR2 comprising an amino acid sequence of SEQ ID NO: 328; and a CDR3 comprising an amino acid sequence of SEQ ID NO: 329;
(70) a CDR1 comprising an amino acid sequence of SEQ ID NO: 330; a CDR2 comprising an amino acid sequence of SEQ ID NO: 331; and a CDR3 comprising an amino acid sequence of SEQ ID NO: 332;
(71) a CDR1 comprising an amino acid sequence of SEQ ID NO: 333; a CDR2 comprising an amino acid sequence of SEQ ID NO: 334; and a CDR3 comprising an amino acid sequence of SEQ ID NO: 335;
(72) a CDR1 comprising an amino acid sequence of SEQ ID NO: 336; a CDR2 comprising an amino acid sequence of SEQ ID NO: 337; and a CDR3 comprising an amino acid sequence of SEQ ID NO: 338;
(73) a CDR1 comprising an amino acid sequence of SEQ ID NO: 339; a CDR2 comprising an amino acid sequence of SEQ ID NO: 340; and a CDR3 comprising an amino acid sequence of SEQ ID NO: 341;
(74) a CDR1 comprising an amino acid sequence of SEQ ID NO: 342; a CDR2 comprising an amino acid sequence of SEQ ID NO: 343; and a CDR3 comprising an amino acid sequence of SEQ ID NO: 344;
(75) a CDR1 comprising an amino acid sequence of SEQ ID NO: 345; a CDR2 comprising an amino acid sequence of SEQ ID NO: 346; and a CDR3 comprising an amino acid sequence of SEQ ID NO: 347;
(76) a CDR1 comprising an amino acid sequence of SEQ ID NO: 348; a CDR2 comprising an amino acid sequence of SEQ ID NO: 349; and a CDR3 comprising an amino acid sequence of SEQ ID NO: 350;
(77) a CDR1 comprising an amino acid sequence of SEQ ID NO: 351; a CDR2 comprising an amino acid sequence of SEQ ID NO: 352; and a CDR3 comprising an amino acid sequence of SEQ ID NO: 353;
(78) a CDR1 comprising an amino acid sequence of SEQ ID NO: 354; a CDR2 comprising an amino acid sequence of SEQ ID NO: 355; and a CDR3 comprising an amino acid sequence of SEQ ID NO: 356;
(79) a CDR1 comprising an amino acid sequence of SEQ ID NO: 357; a CDR2 comprising an amino acid sequence of SEQ ID NO: 358; and a CDR3 comprising an amino acid sequence of SEQ ID NO: 359;
(80) a CDR1 comprising an amino acid sequence of SEQ ID NO: 360; a CDR2 comprising an amino acid sequence of SEQ ID NO: 361; and a CDR3 comprising an amino acid sequence of SEQ ID NO: 362;
(81) a CDR1 comprising an amino acid sequence of SEQ ID NO: 363; a CDR2 comprising an amino acid sequence of SEQ ID NO: 364; and a CDR3 comprising an amino acid sequence of SEQ ID NO: 365;
(82) a CDR1 comprising an amino acid sequence of SEQ ID NO: 366; a CDR2 comprising an amino acid sequence of SEQ ID NO: 367; and a CDR3 comprising an amino acid sequence of SEQ ID NO: 368;
(83) a CDR1 comprising an amino acid sequence of SEQ ID NO: 369; a CDR2 comprising an amino acid sequence of SEQ ID NO: 370; and a CDR3 comprising an amino acid sequence of SEQ ID NO: 371;
(84) a CDR1 comprising an amino acid sequence of SEQ ID NO: 372; a CDR2 comprising an amino acid sequence of SEQ ID NO: 373; and a CDR3 comprising an amino acid sequence of SEQ ID NO: 374;
(85) a CDR1 comprising an amino acid sequence of SEQ ID NO: 375; a CDR2 comprising an amino acid sequence of SEQ ID NO: 376; and a CDR3 comprising an amino acid sequence of SEQ ID NO: 377;
(86) a CDR1 comprising an amino acid sequence of SEQ ID NO: 378; a CDR2 comprising an amino acid sequence of SEQ ID NO: 379; and a CDR3 comprising an amino acid sequence of SEQ ID NO: 380;
(87) a CDR1 comprising an amino acid sequence of SEQ ID NO: 381; a CDR2 comprising an amino acid sequence of SEQ ID NO: 382; and a CDR3 comprising an amino acid sequence of SEQ ID NO: 383;
(88) a CDR1 comprising an amino acid sequence of SEQ ID NO: 384; a CDR2 comprising an amino acid sequence of SEQ ID NO: 385; and a CDR3 comprising an amino acid sequence of SEQ ID NO: 386;
(89) a CDR1 comprising an amino acid sequence of SEQ ID NO: 387; a CDR2 comprising an amino acid sequence of SEQ ID NO: 388; and a CDR3 comprising an amino acid sequence of SEQ ID NO: 389;
(90) a CDR1 comprising an amino acid sequence of SEQ ID NO: 390; a CDR2 comprising an amino acid sequence of SEQ ID NO: 391; and a CDR3 comprising an amino acid sequence of SEQ ID NO: 392;
(91) a CDR1 comprising an amino acid sequence of SEQ ID NO: 393; a CDR2 comprising an amino acid sequence of SEQ ID NO: 394; and a CDR3 comprising an amino acid sequence of SEQ ID NO: 395;
(92) a CDR1 comprising an amino acid sequence of SEQ ID NO: 396; a CDR2 comprising an amino acid sequence of SEQ ID NO: 397; and a CDR3 comprising an amino acid sequence of SEQ ID NO: 398;
(93) a CDR1 comprising an amino acid sequence of SEQ ID NO: 399; a CDR2 comprising an amino acid sequence of SEQ ID NO: 400; and a CDR3 comprising an amino acid sequence of SEQ ID NO: 401;
(94) a CDR1 comprising an amino acid sequence of SEQ ID NO: 402; a CDR2 comprising an amino acid sequence of SEQ ID NO: 403; and a CDR3 comprising an amino acid sequence of SEQ ID NO: 404;
(95) a CDR1 comprising an amino acid sequence of SEQ ID NO: 405; a CDR2 comprising an amino acid sequence of SEQ ID NO: 406; and a CDR3 comprising an amino acid sequence of SEQ ID NO: 407;
(96) a CDR1 comprising an amino acid sequence of SEQ ID NO: 408; a CDR2 comprising an amino acid sequence of SEQ ID NO: 409; and a CDR3 comprising an amino acid sequence of SEQ ID NO: 410;
(97) a CDR1 comprising an amino acid sequence of SEQ ID NO: 411; a CDR2 comprising an amino acid sequence of SEQ ID NO: 412; and a CDR3 comprising an amino acid sequence of SEQ ID NO: 413;
(98) a CDR1 comprising an amino acid sequence of SEQ ID NO: 414; a CDR2 comprising an amino acid sequence of SEQ ID NO: 415; and a CDR3 comprising an amino acid sequence of SEQ ID NO: 416;
(99) a CDR1 comprising an amino acid sequence of SEQ ID NO: 417; a CDR2 comprising an amino acid sequence of SEQ ID NO: 418; and a CDR3 comprising an amino acid sequence of SEQ ID NO: 419;
(100) a CDR1 comprising an amino acid sequence of SEQ ID NO: 420; a CDR2 comprising an amino acid sequence of SEQ ID NO: 421; and a CDR3 comprising an amino acid sequence of SEQ ID NO: 422;
(101) a CDR1 comprising an amino acid sequence of SEQ ID NO: 423; a CDR2 comprising an amino acid sequence of SEQ ID NO: 424; and a CDR3 comprising an amino acid sequence of SEQ ID NO: 425;
(102) a CDR1 comprising an amino acid sequence of SEQ ID NO: 426; a CDR2 comprising an amino acid sequence of SEQ ID NO: 427; and a CDR3 comprising an amino acid sequence of SEQ ID NO: 428;
(103) a CDR1 comprising an amino acid sequence of SEQ ID NO: 429; a CDR2 comprising an amino acid sequence of SEQ ID NO: 430; and a CDR3 comprising an amino acid sequence of SEQ ID NO: 431;
(104) a CDR1 comprising an amino acid sequence of SEQ ID NO: 432; a CDR2 comprising an amino acid sequence of SEQ ID NO: 433; and a CDR3 comprising an amino acid sequence of SEQ ID NO: 434;
(105) a CDR1 comprising an amino acid sequence of SEQ ID NO: 435; a CDR2 comprising an amino acid sequence of SEQ ID NO: 436; and a CDR3 comprising an amino acid sequence of SEQ ID NO: 437;
(106) a CDR1 comprising an amino acid sequence of SEQ ID NO: 438; a CDR2 comprising an amino acid sequence of SEQ ID NO: 439; and a CDR3 comprising an amino acid sequence of SEQ ID NO: 440;
(107) a CDR1 comprising an amino acid sequence of SEQ ID NO: 441; a CDR2 comprising an amino acid sequence of SEQ ID NO: 442; and a CDR3 comprising an amino acid sequence of SEQ ID NO: 443;
(108) a CDR1 comprising an amino acid sequence of SEQ ID NO: 444; a CDR2 comprising an amino acid sequence of SEQ ID NO: 445; and a CDR3 comprising an amino acid sequence of SEQ ID NO: 446;
(109) a CDR1 comprising an amino acid sequence of SEQ ID NO: 447; a CDR2 comprising an amino acid sequence of SEQ ID NO: 448; and a CDR3 comprising an amino acid sequence of SEQ ID NO: 449;
(110) a CDR1 comprising an amino acid sequence of SEQ ID NO: 450; a CDR2 comprising an amino acid sequence of SEQ ID NO: 451; and a CDR3 comprising an amino acid sequence of SEQ ID NO: 452;
(111) a CDR1 comprising an amino acid sequence of SEQ ID NO: 453; a CDR2 comprising an amino acid sequence of SEQ ID NO: 454; and a CDR3 comprising an amino acid sequence of SEQ ID NO: 455;
(112) a CDR1 comprising an amino acid sequence of SEQ ID NO: 456; a CDR2 comprising an amino acid sequence of SEQ ID NO: 457; and a CDR3 comprising an amino acid sequence of SEQ ID NO: 458;
(113) a CDR1 comprising an amino acid sequence of SEQ ID NO: 459; a CDR2 comprising an amino acid sequence of SEQ ID NO: 460; and a CDR3 comprising an amino acid sequence of SEQ ID NO: 461;
(114) a CDR1 comprising an amino acid sequence of SEQ ID NO: 462; a CDR2 comprising an amino acid sequence of SEQ ID NO: 463; and a CDR3 comprising an amino acid sequence of SEQ ID NO: 464;
(115) a CDR1 comprising an amino acid sequence of SEQ ID NO: 465; a CDR2 comprising an amino acid sequence of SEQ ID NO: 466; and a CDR3 comprising an amino acid sequence of SEQ ID NO: 467;
(116) a CDR1 comprising an amino acid sequence of SEQ ID NO: 468; a CDR2 comprising an amino acid sequence of SEQ ID NO: 469; and a CDR3 comprising an amino acid sequence of SEQ ID NO: 470;
(117) a CDR1 comprising an amino acid sequence of SEQ ID NO: 471; a CDR2 comprising an amino acid sequence of SEQ ID NO: 472; and a CDR3 comprising an amino acid sequence of SEQ ID NO: 473;
(118) a CDR1 comprising an amino acid sequence of SEQ ID NO: 474; a CDR2 comprising an amino acid sequence of SEQ ID NO: 475; and a CDR3 comprising an amino acid sequence of SEQ ID NO: 476;
(119) a CDR1 comprising an amino acid sequence of SEQ ID NO: 477; a CDR2 comprising an amino acid sequence of SEQ ID NO: 478; and a CDR3 comprising an amino acid sequence of SEQ ID NO: 479;
(120) a CDR1 comprising an amino acid sequence of SEQ ID NO: 480; a CDR2 comprising an amino acid sequence of SEQ ID NO: 481; and a CDR3 comprising an amino acid sequence of SEQ ID NO: 482;
(121) a CDR1 comprising an amino acid sequence of SEQ ID NO: 483; a CDR2 comprising an amino acid sequence of SEQ ID NO: 484; and a CDR3 comprising an amino acid sequence of SEQ ID NO: 485;
(122) a CDR1 comprising an amino acid sequence of SEQ ID NO: 486; a CDR2 comprising an amino acid sequence of SEQ ID NO: 487; and a CDR3 comprising an amino acid sequence of SEQ ID NO: 488;
(123) a CDR1 comprising an amino acid sequence of SEQ ID NO: 489; a CDR2 comprising an amino acid sequence of SEQ ID NO: 490; and a CDR3 comprising an amino acid sequence of SEQ ID NO: 491;
(124) a CDR1 comprising an amino acid sequence of SEQ ID NO: 492; a CDR2 comprising an amino acid sequence of SEQ ID NO: 493; and a CDR3 comprising an amino acid sequence of SEQ ID NO: 494;
(125) a CDR1 comprising an amino acid sequence of SEQ ID NO: 495; a CDR2 comprising an amino acid sequence of SEQ ID NO: 496; and a CDR3 comprising an amino acid sequence of SEQ ID NO: 497;
(126) a CDR1 comprising an amino acid sequence of SEQ ID NO: 498; a CDR2 comprising an amino acid sequence of SEQ ID NO: 499; and a CDR3 comprising an amino acid sequence of SEQ ID NO: 500;
(127) a CDR1 comprising an amino acid sequence of SEQ ID NO: 501; a CDR2 comprising an amino acid sequence of SEQ ID NO: 502; and a CDR3 comprising an amino acid sequence of SEQ ID NO: 503;
(128) a CDR1 comprising an amino acid sequence of SEQ ID NO: 504; a CDR2 comprising an amino acid sequence of SEQ ID NO: 505; and a CDR3 comprising an amino acid sequence of SEQ ID NO: 506;
(129) a CDR1 comprising an amino acid sequence of SEQ ID NO: 507; a CDR2 comprising an amino acid sequence of SEQ ID NO: 508; and a CDR3 comprising an amino acid sequence of SEQ ID NO: 509;
(130) a CDR1 comprising an amino acid sequence of SEQ ID NO: 510; a CDR2 comprising an amino acid sequence of SEQ ID NO: 511; and a CDR3 comprising an amino acid sequence of SEQ ID NO: 512;
(131) a CDR1 comprising an amino acid sequence of SEQ ID NO: 513; a CDR2 comprising an amino acid sequence of SEQ ID NO: 514; and a CDR3 comprising an amino acid sequence of SEQ ID NO: 515;
(132) a CDR1 comprising an amino acid sequence of SEQ ID NO: 516; a CDR2 comprising an amino acid sequence of SEQ ID NO: 517; and a CDR3 comprising an amino acid sequence of SEQ ID NO: 518;
(133) a CDR1 comprising an amino acid sequence of SEQ ID NO: 519; a CDR2 comprising an amino acid sequence of SEQ ID NO: 520; and a CDR3 comprising an amino acid sequence of SEQ ID NO: 521;
(134) a CDR1 comprising an amino acid sequence of SEQ ID NO: 522; a CDR2 comprising an amino acid sequence of SEQ ID NO: 523; and a CDR3 comprising an amino acid sequence of SEQ ID NO: 524;
(135) a CDR1 comprising an amino acid sequence of SEQ ID NO: 525; a CDR2 comprising an amino acid sequence of SEQ ID NO: 526; and a CDR3 comprising an amino acid sequence of SEQ ID NO: 527;
(136) a CDR1 comprising an amino acid sequence of SEQ ID NO: 528; a CDR2 comprising an amino acid sequence of SEQ ID NO: 529; and a CDR3 comprising an amino acid sequence of SEQ ID NO: 530;
(137) a CDR1 comprising an amino acid sequence of SEQ ID NO: 531; a CDR2 comprising an amino acid sequence of SEQ ID NO: 532; and a CDR3 comprising an amino acid sequence of SEQ ID NO: 533;
(138) a CDR1 comprising an amino acid sequence of SEQ ID NO: 534; a CDR2 comprising an amino acid sequence of SEQ ID NO: 535; and a CDR3 comprising an amino acid sequence of SEQ ID NO: 536;
(139) a CDR1 comprising an amino acid sequence of SEQ ID NO: 537; a CDR2 comprising an amino acid sequence of SEQ ID NO: 538; and a CDR3 comprising an amino acid sequence of SEQ ID NO: 539;
(140) a CDR1 comprising an amino acid sequence of SEQ ID NO: 540; a CDR2 comprising an amino acid sequence of SEQ ID NO: 541; and a CDR3 comprising an amino acid sequence of SEQ ID NO: 542;
(141) a CDR1 comprising an amino acid sequence of SEQ ID NO: 543; a CDR2 comprising an amino acid sequence of SEQ ID NO: 544; and a CDR3 comprising an amino acid sequence of SEQ ID NO: 545;
(142) a CDR1 comprising an amino acid sequence of SEQ ID NO: 546; a CDR2 comprising an amino acid sequence of SEQ ID NO: 547; and a CDR3 comprising an amino acid sequence of SEQ ID NO: 548;
(143) a CDR1 comprising an amino acid sequence of SEQ ID NO: 549; a CDR2 comprising an amino acid sequence of SEQ ID NO: 550; and a CDR3 comprising an amino acid sequence of SEQ ID NO: 551;
(144) a CDR1 comprising an amino acid sequence of SEQ ID NO: 552; a CDR2 comprising an amino acid sequence of SEQ ID NO: 553; and a CDR3 comprising an amino acid sequence of SEQ ID NO: 554;
(145) a CDR1 comprising an amino acid sequence of SEQ ID NO: 555; a CDR2 comprising an amino acid sequence of SEQ ID NO: 556; and a CDR3 comprising an amino acid sequence of SEQ ID NO: 557;
(146) a CDR1 comprising an amino acid sequence of SEQ ID NO: 558; a CDR2 comprising an amino acid sequence of SEQ ID NO: 559; and a CDR3 comprising an amino acid sequence of SEQ ID NO: 560;
(147) a CDR1 comprising an amino acid sequence of SEQ ID NO: 561; a CDR2 comprising an amino acid sequence of SEQ ID NO: 562; and a CDR3 comprising an amino acid sequence of SEQ ID NO: 563;
(148) a CDR1 comprising an amino acid sequence of SEQ ID NO: 564; a CDR2 comprising an amino acid sequence of SEQ ID NO: 565; and a CDR3 comprising an amino acid sequence of SEQ ID NO: 566;
(149) a CDR1 comprising an amino acid sequence of SEQ ID NO: 567; a CDR2 comprising an amino acid sequence of SEQ ID NO: 568; and a CDR3 comprising an amino acid sequence of SEQ ID NO: 569;
(150) a CDR1 comprising an amino acid sequence of SEQ ID NO: 570; a CDR2 comprising an amino acid sequence of SEQ ID NO: 571; and a CDR3 comprising an amino acid sequence of SEQ ID NO: 572;
(151) a CDR1 comprising an amino acid sequence of SEQ ID NO: 573; a CDR2 comprising an amino acid sequence of SEQ ID NO: 574; and a CDR3 comprising an amino acid sequence of SEQ ID NO: 575;
(152) a CDR1 comprising an amino acid sequence of SEQ ID NO: 576; a CDR2 comprising an amino acid sequence of SEQ ID NO: 577; and a CDR3 comprising an amino acid sequence of SEQ ID NO: 578;
(153) a CDR1 comprising an amino acid sequence of SEQ ID NO: 579; a CDR2 comprising an amino acid sequence of SEQ ID NO: 580; and a CDR3 comprising an amino acid sequence of SEQ ID NO: 581;
(154) a CDR1 comprising an amino acid sequence of SEQ ID NO: 582; a CDR2 comprising an amino acid sequence of SEQ ID NO: 583; and a CDR3 comprising an amino acid sequence of SEQ ID NO: 584;
(155) a CDR1 comprising an amino acid sequence of SEQ ID NO: 585; a CDR2 comprising an amino acid sequence of SEQ ID NO: 586; and a CDR3 comprising an amino acid sequence of SEQ ID NO: 587;
(156) a CDR1 comprising an amino acid sequence of SEQ ID NO: 588; a CDR2 comprising an amino acid sequence of SEQ ID NO: 589; and a CDR3 comprising an amino acid sequence of SEQ ID NO: 590;
(157) a CDR1 comprising an amino acid sequence of SEQ ID NO: 591; a CDR2 comprising an amino acid sequence of SEQ ID NO: 592; and a CDR3 comprising an amino acid sequence of SEQ ID NO: 593;
(158) a CDR1 comprising an amino acid sequence of SEQ ID NO: 594; a CDR2 comprising an amino acid sequence of SEQ ID NO: 595; and a CDR3 comprising an amino acid sequence of SEQ ID NO: 596;
(159) a CDR1 comprising an amino acid sequence of SEQ ID NO: 597; a CDR2 comprising an amino acid sequence of SEQ ID NO: 598; and a CDR3 comprising an amino acid sequence of SEQ ID NO: 599;
(160) a CDR1 comprising an amino acid sequence of SEQ ID NO: 600; a CDR2 comprising an amino acid sequence of SEQ ID NO: 601; and a CDR3 comprising an amino acid sequence of SEQ ID NO: 602;
(161) a CDR1 comprising an amino acid sequence of SEQ ID NO: 603; a CDR2 comprising an amino acid sequence of SEQ ID NO: 604; and a CDR3 comprising an amino acid sequence of SEQ ID NO: 605;
(162) a CDR1 comprising an amino acid sequence of SEQ ID NO: 606; a CDR2 comprising an amino acid sequence of SEQ ID NO: 607; and a CDR3 comprising an amino acid sequence of SEQ ID NO: 608;
(163) a CDR1 comprising an amino acid sequence of SEQ ID NO: 609; a CDR2 comprising an amino acid sequence of SEQ ID NO: 610; and a CDR3 comprising an amino acid sequence of SEQ ID NO: 611;
(164) a CDR1 comprising an amino acid sequence of SEQ ID NO: 612; a CDR2 comprising an amino acid sequence of SEQ ID NO: 613; and a CDR3 comprising an amino acid sequence of SEQ ID NO: 614;
(165) a CDR1 comprising an amino acid sequence of SEQ ID NO: 615; a CDR2 comprising an amino acid sequence of SEQ ID NO: 616; and a CDR3 comprising an amino acid sequence of SEQ ID NO: 617;
(166) a CDR1 comprising an amino acid sequence of SEQ ID NO: 618; a CDR2 comprising an amino acid sequence of SEQ ID NO: 619; and a CDR3 comprising an amino acid sequence of SEQ ID NO: 620;
(167) a CDR1 comprising an amino acid sequence of SEQ ID NO: 621; a CDR2 comprising an amino acid sequence of SEQ ID NO: 622; and a CDR3 comprising an amino acid sequence of SEQ ID NO: 623;
(168) a CDR1 comprising an amino acid sequence of SEQ ID NO: 624; a CDR2 comprising an amino acid sequence of SEQ ID NO: 625; and a CDR3 comprising an amino acid sequence of SEQ ID NO: 626;
(169) a CDR1 comprising an amino acid sequence of SEQ ID NO: 627; a CDR2 comprising an amino acid sequence of SEQ ID NO: 628; and a CDR3 comprising an amino acid sequence of SEQ ID NO: 629;
(170) a CDR1 comprising an amino acid sequence of SEQ ID NO: 630; a CDR2 comprising an amino acid sequence of SEQ ID NO: 631; and a CDR3 comprising an amino acid sequence of SEQ ID NO: 632;
(171) a CDR1 comprising an amino acid sequence of SEQ ID NO: 633; a CDR2 comprising an amino acid sequence of SEQ ID NO: 634; and a CDR3 comprising an amino acid sequence of SEQ ID NO: 635;
(172) a CDR1 comprising an amino acid sequence of SEQ ID NO: 636; a CDR2 comprising an amino acid sequence of SEQ ID NO: 637; and a CDR3 comprising an amino acid sequence of SEQ ID NO: 638;
(173) a CDR1 comprising an amino acid sequence of SEQ ID NO: 639; a CDR2 comprising an amino acid sequence of SEQ ID NO: 640; and a CDR3 comprising an amino acid sequence of SEQ ID NO: 641;
(174) a CDR1 comprising an amino acid sequence of SEQ ID NO: 642; a CDR2 comprising an amino acid sequence of SEQ ID NO: 643; and a CDR3 comprising an amino acid sequence of SEQ ID NO: 644;
(175) a CDR1 comprising an amino acid sequence of SEQ ID NO: 645; a CDR2 comprising an amino acid sequence of SEQ ID NO: 646; and a CDR3 comprising an amino acid sequence of SEQ ID NO: 647;
(176) a CDR1 comprising an amino acid sequence of SEQ ID NO: 648; a CDR2 comprising an amino acid sequence of SEQ ID NO: 649; and a CDR3 comprising an amino acid sequence of SEQ ID NO: 650;
(177) a CDR1 comprising an amino acid sequence of SEQ ID NO: 651; a CDR2 comprising an amino acid sequence of SEQ ID NO: 652; and a CDR3 comprising an amino acid sequence of SEQ ID NO: 653;
(178) a CDR1 comprising an amino acid sequence of SEQ ID NO: 654; a CDR2 comprising an amino acid sequence of SEQ ID NO: 655; and a CDR3 comprising an amino acid sequence of SEQ ID NO: 656;
(179) a CDR1 comprising an amino acid sequence of SEQ ID NO: 657; a CDR2 comprising an amino acid sequence of SEQ ID NO: 658; and a CDR3 comprising an amino acid sequence of SEQ ID NO: 659;
(180) a CDR1 comprising an amino acid sequence of SEQ ID NO: 660; a CDR2 comprising an amino acid sequence of SEQ ID NO: 661; and a CDR3 comprising an amino acid sequence of SEQ ID NO: 662;
(181) a CDR1 comprising an amino acid sequence of SEQ ID NO: 663; a CDR2 comprising an amino acid sequence of SEQ ID NO: 664; and a CDR3 comprising an amino acid sequence of SEQ ID NO: 665;
(182) a CDR1 comprising an amino acid sequence of SEQ ID NO: 666; a CDR2 comprising an amino acid sequence of SEQ ID NO: 667; and a CDR3 comprising an amino acid sequence of SEQ ID NO: 668;
(183) a CDR1 comprising an amino acid sequence of SEQ ID NO: 669; a CDR2 comprising an amino acid sequence of SEQ ID NO: 670; and a CDR3 comprising an amino acid sequence of SEQ ID NO: 671;
(184) a CDR1 comprising an amino acid sequence of SEQ ID NO: 672; a CDR2 comprising an amino acid sequence of SEQ ID NO: 673; and a CDR3 comprising an amino acid sequence of SEQ ID NO: 674;
(185) a CDR1 comprising an amino acid sequence of SEQ ID NO: 675; a CDR2 comprising an amino acid sequence of SEQ ID NO: 676; and a CDR3 comprising an amino acid sequence of SEQ ID NO: 677;
(186) a CDR1 comprising an amino acid sequence of SEQ ID NO: 678; a CDR2 comprising an amino acid sequence of SEQ ID NO: 679; and a CDR3 comprising an amino acid sequence of SEQ ID NO: 680;
(187) a CDR1 comprising an amino acid sequence of SEQ ID NO: 681; a CDR2 comprising an amino acid sequence of SEQ ID NO: 682; and a CDR3 comprising an amino acid sequence of SEQ ID NO: 683;
(188) a CDR1 comprising an amino acid sequence of SEQ ID NO: 684; a CDR2 comprising an amino acid sequence of SEQ ID NO: 685; and a CDR3 comprising an amino acid sequence of SEQ ID NO: 686;
(189) a CDR1 comprising an amino acid sequence of SEQ ID NO: 687; a CDR2 comprising an amino acid sequence of SEQ ID NO: 688; and a CDR3 comprising an amino acid sequence of SEQ ID NO: 689;
(190) a CDR1 comprising an amino acid sequence of SEQ ID NO: 690; a CDR2 comprising an amino acid sequence of SEQ ID NO: 691; and a CDR3 comprising an amino acid sequence of SEQ ID NO: 692;
(191) a CDR1 comprising an amino acid sequence of SEQ ID NO: 693; a CDR2 comprising an amino acid sequence of SEQ ID NO: 694; and a CDR3 comprising an amino acid sequence of SEQ ID NO: 695;
(192) a CDR1 comprising an amino acid sequence of SEQ ID NO: 696; a CDR2 comprising an amino acid sequence of SEQ ID NO: 697; and a CDR3 comprising an amino acid sequence of SEQ ID NO: 698;
(193) a CDR1 comprising an amino acid sequence of SEQ ID NO: 699; a CDR2 comprising an amino acid sequence of SEQ ID NO: 700; and a CDR3 comprising an amino acid sequence of SEQ ID NO: 701;
(194) a CDR1 comprising an amino acid sequence of SEQ ID NO: 702; a CDR2 comprising an amino acid sequence of SEQ ID NO: 703; and a CDR3 comprising an amino acid sequence of SEQ ID NO: 704;
(195) a CDR1 comprising an amino acid sequence of SEQ ID NO: 705; a CDR2 comprising an amino acid sequence of SEQ ID NO: 706; and a CDR3 comprising an amino acid sequence of SEQ ID NO: 707;
(196) a CDR1 comprising an amino acid sequence of SEQ ID NO: 708; a CDR2 comprising an amino acid sequence of SEQ ID NO: 709; and a CDR3 comprising an amino acid sequence of SEQ ID NO: 710;
(197) a CDR1 comprising an amino acid sequence of SEQ ID NO: 711; a CDR2 comprising an amino acid sequence of SEQ ID NO: 712; and a CDR3 comprising an amino acid sequence of SEQ ID NO: 713;
(198) a CDR1 comprising an amino acid sequence of SEQ ID NO: 714; a CDR2 comprising an amino acid sequence of SEQ ID NO: 715; and a CDR3 comprising an amino acid sequence of SEQ ID NO: 716;
(199) a CDR1 comprising an amino acid sequence of SEQ ID NO: 717; a CDR2 comprising an amino acid sequence of SEQ ID NO: 718; and a CDR3 comprising an amino acid sequence of SEQ ID NO: 719;
(200) a CDR1 comprising an amino acid sequence of SEQ ID NO: 720; a CDR2 comprising an amino acid sequence of SEQ ID NO: 721; and a CDR3 comprising an amino acid sequence of SEQ ID NO: 722;
(201) a CDR1 comprising an amino acid sequence of SEQ ID NO: 723; a CDR2 comprising an amino acid sequence of SEQ ID NO: 724; and a CDR3 comprising an amino acid sequence of SEQ ID NO: 725;
(202) a CDR1 comprising an amino acid sequence of SEQ ID NO: 726; a CDR2 comprising an amino acid sequence of SEQ ID NO: 727; and a CDR3 comprising an amino acid sequence of SEQ ID NO: 728;
(203) a CDR1 comprising an amino acid sequence of SEQ ID NO: 729; a CDR2 comprising an amino acid sequence of SEQ ID NO: 730; and a CDR3 comprising an amino acid sequence of SEQ ID NO: 731;
(204) a CDR1 comprising an amino acid sequence of SEQ ID NO: 732; a CDR2 comprising an amino acid sequence of SEQ ID NO: 733; and a CDR3 comprising an amino acid sequence of SEQ ID NO: 734;
(205) a CDR1 comprising an amino acid sequence of SEQ ID NO: 735; a CDR2 comprising an amino acid sequence of SEQ ID NO: 736; and a CDR3 comprising an amino acid sequence of SEQ ID NO: 737;
(206) a CDR1 comprising an amino acid sequence of SEQ ID NO: 738; a CDR2 comprising an amino acid sequence of SEQ ID NO: 739; and a CDR3 comprising an amino acid sequence of SEQ ID NO: 740;
(207) a CDR1 comprising an amino acid sequence of SEQ ID NO: 741; a CDR2 comprising an amino acid sequence of SEQ ID NO: 742; and a CDR3 comprising an amino acid sequence of SEQ ID NO: 743;
(208) a CDR1 comprising an amino acid sequence of SEQ ID NO: 744; a CDR2 comprising an amino acid sequence of SEQ ID NO: 745; and a CDR3 comprising an amino acid sequence of SEQ ID NO: 746;
(209) a CDR1 comprising an amino acid sequence of SEQ ID NO: 747; a CDR2 comprising an amino acid sequence of SEQ ID NO: 748; and a CDR3 comprising an amino acid sequence of SEQ ID NO: 749;
(210) a CDR1 comprising an amino acid sequence of SEQ ID NO: 750; a CDR2 comprising an amino acid sequence of SEQ ID NO: 751; and a CDR3 comprising an amino acid sequence of SEQ ID NO: 752;
(211) a CDR1 comprising an amino acid sequence of SEQ ID NO: 753; a CDR2 comprising an amino acid sequence of SEQ ID NO: 754; and a CDR3 comprising an amino acid sequence of SEQ ID NO: 755;
(212) a CDR1 comprising an amino acid sequence of SEQ ID NO: 756; a CDR2 comprising an amino acid sequence of SEQ ID NO: 757; and a CDR3 comprising an amino acid sequence of SEQ ID NO: 758;
(213) a CDR1 comprising an amino acid sequence of SEQ ID NO: 759; a CDR2 comprising an amino acid sequence of SEQ ID NO: 760; and a CDR3 comprising an amino acid sequence of SEQ ID NO: 761;
(214) a CDR1 comprising an amino acid sequence of SEQ ID NO: 762; a CDR2 comprising an amino acid sequence of SEQ ID NO: 763; and a CDR3 comprising an amino acid sequence of SEQ ID NO: 764;
(215) a CDR1 comprising an amino acid sequence of SEQ ID NO: 765; a CDR2 comprising an amino acid sequence of SEQ ID NO: 766; and a CDR3 comprising an amino acid sequence of SEQ ID NO: 767;
(216) a CDR1 comprising an amino acid sequence of SEQ ID NO: 768; a CDR2 comprising an amino acid sequence of SEQ ID NO: 769; and a CDR3 comprising an amino acid sequence of SEQ ID NO: 770;
(217) a CDR1 comprising an amino acid sequence of SEQ ID NO: 771; a CDR2 comprising an amino acid sequence of SEQ ID NO: 772; and a CDR3 comprising an amino acid sequence of SEQ ID NO: 773;
(218) a CDR1 comprising an amino acid sequence of SEQ ID NO: 774; a CDR2 comprising an amino acid sequence of SEQ ID NO: 775; and a CDR3 comprising an amino acid sequence of SEQ ID NO: 776;
(219) a CDR1 comprising an amino acid sequence of SEQ ID NO: 777; a CDR2 comprising an amino acid sequence of SEQ ID NO: 778; and a CDR3 comprising an amino acid sequence of SEQ ID NO: 779;
(220) a CDR1 comprising an amino acid sequence of SEQ ID NO: 780; a CDR2 comprising an amino acid sequence of SEQ ID NO: 781; and a CDR3 comprising an amino acid sequence of SEQ ID NO: 782;
(221) a CDR1 comprising an amino acid sequence of SEQ ID NO: 783; a CDR2 comprising an amino acid sequence of SEQ ID NO: 784; and a CDR3 comprising an amino acid sequence of SEQ ID NO: 785;
(222) a CDR1 comprising an amino acid sequence of SEQ ID NO: 786; a CDR2 comprising an amino acid sequence of SEQ ID NO: 787; and a CDR3 comprising an amino acid sequence of SEQ ID NO: 788;
(223) a CDR1 comprising an amino acid sequence of SEQ ID NO: 789; a CDR2 comprising an amino acid sequence of SEQ ID NO: 790; and a CDR3 comprising an amino acid sequence of SEQ ID NO: 791;
(224) a CDR1 comprising an amino acid sequence of SEQ ID NO: 792; a CDR2 comprising an amino acid sequence of SEQ ID NO: 793; and a CDR3 comprising an amino acid sequence of SEQ ID NO: 794;
(225) a CDR1 comprising an amino acid sequence of SEQ ID NO: 795; a CDR2 comprising an amino acid sequence of SEQ ID NO: 796; and a CDR3 comprising an amino acid sequence of SEQ ID NO: 797;
(226) a CDR1 comprising an amino acid sequence of SEQ ID NO: 798; a CDR2 comprising an amino acid sequence of SEQ ID NO: 799; and a CDR3 comprising an amino acid sequence of SEQ ID NO: 800;
(227) a CDR1 comprising an amino acid sequence of SEQ ID NO: 801; a CDR2 comprising an amino acid sequence of SEQ ID NO: 802; and a CDR3 comprising an amino acid sequence of SEQ ID NO: 803;
(228) a CDR1 comprising an amino acid sequence of SEQ ID NO: 804; a CDR2 comprising an amino acid sequence of SEQ ID NO: 805; and a CDR3 comprising an amino acid sequence of SEQ ID NO: 806;
(229) a CDR1 comprising an amino acid sequence of SEQ ID NO: 807; a CDR2 comprising an amino acid sequence of SEQ ID NO: 808; and a CDR3 comprising an amino acid sequence of SEQ ID NO: 809;
(230) a CDR1 comprising an amino acid sequence of SEQ ID NO: 810; a CDR2 comprising an amino acid sequence of SEQ ID NO: 811; and a CDR3 comprising an amino acid sequence of SEQ ID NO: 812;
(231) a CDR1 comprising an amino acid sequence of SEQ ID NO: 813; a CDR2 comprising an amino acid sequence of SEQ ID NO: 814; and a CDR3 comprising an amino acid sequence of SEQ ID NO: 815;
(232) a CDR1 comprising an amino acid sequence of SEQ ID NO: 816; a CDR2 comprising an amino acid sequence of SEQ ID NO: 817; and a CDR3 comprising an amino acid sequence of SEQ ID NO: 818;
(233) a CDR1 comprising an amino acid sequence of SEQ ID NO: 819; a CDR2 comprising an amino acid sequence of SEQ ID NO: 820; and a CDR3 comprising an amino acid sequence of SEQ ID NO: 821;
(234) a CDR1 comprising an amino acid sequence of SEQ ID NO: 822; a CDR2 comprising an amino acid sequence of SEQ ID NO: 823; and a CDR3 comprising an amino acid sequence of SEQ ID NO: 824;
(235) a CDR1 comprising an amino acid sequence of SEQ ID NO: 825; a CDR2 comprising an amino acid sequence of SEQ ID NO: 826; and a CDR3 comprising an amino acid sequence of SEQ ID NO: 827;
(236) a CDR1 comprising an amino acid sequence of SEQ ID NO: 828; a CDR2 comprising an amino acid sequence of SEQ ID NO: 829; and a CDR3 comprising an amino acid sequence of SEQ ID NO: 830;
(237) a CDR1 comprising an amino acid sequence of SEQ ID NO: 831; a CDR2 comprising an amino acid sequence of SEQ ID NO: 832; and a CDR3 comprising an amino acid sequence of SEQ ID NO: 833;
(238) a CDR1 comprising an amino acid sequence of SEQ ID NO: 834; a CDR2 comprising an amino acid sequence of SEQ ID NO: 835; and a CDR3 comprising an amino acid sequence of SEQ ID NO: 836;
(239) a CDR1 comprising an amino acid sequence of SEQ ID NO: 837; a CDR2 comprising an amino acid sequence of SEQ ID NO: 838; and a CDR3 comprising an amino acid sequence of SEQ ID NO: 839;
(240) a CDR1 comprising an amino acid sequence of SEQ ID NO: 840; a CDR2 comprising an amino acid sequence of SEQ ID NO: 841; and a CDR3 comprising an amino acid sequence of SEQ ID NO: 842;
(241) a CDR1 comprising an amino acid sequence of SEQ ID NO: 843; a CDR2 comprising an amino acid sequence of SEQ ID NO: 844; and a CDR3 comprising an amino acid sequence of SEQ ID NO: 845;
(242) a CDR1 comprising an amino acid sequence of SEQ ID NO: 846; a CDR2 comprising an amino acid sequence of SEQ ID NO: 847; and a CDR3 comprising an amino acid sequence of SEQ ID NO: 848;
(243) a CDR1 comprising an amino acid sequence of SEQ ID NO: 849; a CDR2 comprising an amino acid sequence of SEQ ID NO: 850; and a CDR3 comprising an amino acid sequence of SEQ ID NO: 851;
(244) a CDR1 comprising an amino acid sequence of SEQ ID NO: 852; a CDR2 comprising an amino acid sequence of SEQ ID NO: 853; and a CDR3 comprising an amino acid sequence of SEQ ID NO: 854;
(245) a CDR1 comprising an amino acid sequence of SEQ ID NO: 855; a CDR2 comprising an amino acid sequence of SEQ ID NO: 856; and a CDR3 comprising an amino acid sequence of SEQ ID NO: 857;
(246) a CDR1 comprising an amino acid sequence of SEQ ID NO: 858; a CDR2 comprising an amino acid sequence of SEQ ID NO: 859; and a CDR3 comprising an amino acid sequence of SEQ ID NO: 860;
(247) a CDR1 comprising an amino acid sequence of SEQ ID NO: 861; a CDR2 comprising an amino acid sequence of SEQ ID NO: 862; and a CDR3 comprising an amino acid sequence of SEQ ID NO: 863;
(248) a CDR1 comprising an amino acid sequence of SEQ ID NO: 864; a CDR2 comprising an amino acid sequence of SEQ ID NO: 865; and a CDR3 comprising an amino acid sequence of SEQ ID NO: 866;
(249) a CDR1 comprising an amino acid sequence of SEQ ID NO: 867; a CDR2 comprising an amino acid sequence of SEQ ID NO: 868; and a CDR3 comprising an amino acid sequence of SEQ ID NO: 869;
(250) a CDR1 comprising an amino acid sequence of SEQ ID NO: 870; a CDR2 comprising an amino acid sequence of SEQ ID NO: 871; and a CDR3 comprising an amino acid sequence of SEQ ID NO: 872;
(251) a CDR1 comprising an amino acid sequence of SEQ ID NO: 873; a CDR2 comprising an amino acid sequence of SEQ ID NO: 874; and a CDR3 comprising an amino acid sequence of SEQ ID NO: 875;
(252) a CDR1 comprising an amino acid sequence of SEQ ID NO: 876; a CDR2 comprising an amino acid sequence of SEQ ID NO: 877; and a CDR3 comprising an amino acid sequence of SEQ ID NO: 878;
(253) a CDR1 comprising an amino acid sequence of SEQ ID NO: 879; a CDR2 comprising an amino acid sequence of SEQ ID NO: 880; and a CDR3 comprising an amino acid sequence of SEQ ID NO: 881;
(254) a CDR1 comprising an amino acid sequence of SEQ ID NO: 882; a CDR2 comprising an amino acid sequence of SEQ ID NO: 883; and a CDR3 comprising an amino acid sequence of SEQ ID NO: 884;
(255) a CDR1 comprising an amino acid sequence of SEQ ID NO: 885; a CDR2 comprising an amino acid sequence of SEQ ID NO: 886; and a CDR3 comprising an amino acid sequence of SEQ ID NO: 887;
(256) a CDR1 comprising an amino acid sequence of SEQ ID NO: 888; a CDR2 comprising an amino acid sequence of SEQ ID NO: 889; and a CDR3 comprising an amino acid sequence of SEQ ID NO: 890;
(257) a CDR1 comprising an amino acid sequence of SEQ ID NO: 891; a CDR2 comprising an amino acid sequence of SEQ ID NO: 892; and a CDR3 comprising an amino acid sequence of SEQ ID NO: 893;
(258) a CDR1 comprising an amino acid sequence of SEQ ID NO: 894; a CDR2 comprising an amino acid sequence of SEQ ID NO: 895; and a CDR3 comprising an amino acid sequence of SEQ ID NO: 896;
(259) a CDR1 comprising an amino acid sequence of SEQ ID NO: 897; a CDR2 comprising an amino acid sequence of SEQ ID NO: 898; and a CDR3 comprising an amino acid sequence of SEQ ID NO: 899;
(260) a CDR1 comprising an amino acid sequence of SEQ ID NO: 900; a CDR2 comprising an amino acid sequence of SEQ ID NO: 901; and a CDR3 comprising an amino acid sequence of SEQ ID NO: 902;
(261) a CDR1 comprising an amino acid sequence of SEQ ID NO: 903; a CDR2 comprising an amino acid sequence of SEQ ID NO: 904; and a CDR3 comprising an amino acid sequence of SEQ ID NO: 905;
(262) a CDR1 comprising an amino acid sequence of SEQ ID NO: 906; a CDR2 comprising an amino acid sequence of SEQ ID NO: 907; and a CDR3 comprising an amino acid sequence of SEQ ID NO: 908;
(263) a CDR1 comprising an amino acid sequence of SEQ ID NO: 909; a CDR2 comprising an amino acid sequence of SEQ ID NO: 910; and a CDR3 comprising an amino acid sequence of SEQ ID NO: 911;
(264) a CDR1 comprising an amino acid sequence of SEQ ID NO: 912; a CDR2 comprising an amino acid sequence of SEQ ID NO: 913; and a CDR3 comprising an amino acid sequence of SEQ ID NO: 914;
(265) a CDR1 comprising an amino acid sequence of SEQ ID NO: 915; a CDR2 comprising an amino acid sequence of SEQ ID NO: 916; and a CDR3 comprising an amino acid sequence of SEQ ID NO: 917;
(266) a CDR1 comprising an amino acid sequence of SEQ ID NO: 918; a CDR2 comprising an amino acid sequence of SEQ ID NO: 919; and a CDR3 comprising an amino acid sequence of SEQ ID NO: 920;
(267) a CDR1 comprising an amino acid sequence of SEQ ID NO: 921; a CDR2 comprising an amino acid sequence of SEQ ID NO: 922; and a CDR3 comprising an amino acid sequence of SEQ ID NO: 923;
(268) a CDR1 comprising an amino acid sequence of SEQ ID NO: 924; a CDR2 comprising an amino acid sequence of SEQ ID NO: 925; and a CDR3 comprising an amino acid sequence of SEQ ID NO: 926;
(269) a CDR1 comprising an amino acid sequence of SEQ ID NO: 927; a CDR2 comprising an amino acid sequence of SEQ ID NO: 928; and a CDR3 comprising an amino acid sequence of SEQ ID NO: 929;
(270) a CDR1 comprising an amino acid sequence of SEQ ID NO: 930; a CDR2 comprising an amino acid sequence of SEQ ID NO: 931; and a CDR3 comprising an amino acid sequence of SEQ ID NO: 932;
(271) a CDR1 comprising an amino acid sequence of SEQ ID NO: 933; a CDR2 comprising an amino acid sequence of SEQ ID NO: 934; and a CDR3 comprising an amino acid sequence of SEQ ID NO: 935;
(272) a CDR1 comprising an amino acid sequence of SEQ ID NO: 936; a CDR2 comprising an amino acid sequence of SEQ ID NO: 937; and a CDR3 comprising an amino acid sequence of SEQ ID NO: 938;
(273) a CDR1 comprising an amino acid sequence of SEQ ID NO: 939; a CDR2 comprising an amino acid sequence of SEQ ID NO: 940; and a CDR3 comprising an amino acid sequence of SEQ ID NO: 941;
(274) a CDR1 comprising an amino acid sequence of SEQ ID NO: 942; a CDR2 comprising an amino acid sequence of SEQ ID NO: 943; and a CDR3 comprising an amino acid sequence of SEQ ID NO: 944;
(275) a CDR1 comprising an amino acid sequence of SEQ ID NO: 945; a CDR2 comprising an amino acid sequence of SEQ ID NO: 946; and a CDR3 comprising an amino acid sequence of SEQ ID NO: 947;
(276) a CDR1 comprising an amino acid sequence of SEQ ID NO: 948; a CDR2 comprising an amino acid sequence of SEQ ID NO: 949; and a CDR3 comprising an amino acid sequence of SEQ ID NO: 950;
(277) a CDR1 comprising an amino acid sequence of SEQ ID NO: 951; a CDR2 comprising an amino acid sequence of SEQ ID NO: 952; and a CDR3 comprising an amino acid sequence of SEQ ID NO: 953;
(278) a CDR1 comprising an amino acid sequence of SEQ ID NO: 954; a CDR2 comprising an amino acid sequence of SEQ ID NO: 955; and a CDR3 comprising an amino acid sequence of SEQ ID NO: 956;
(279) a CDR1 comprising an amino acid sequence of SEQ ID NO: 957; a CDR2 comprising an amino acid sequence of SEQ ID NO: 958; and a CDR3 comprising an amino acid sequence of SEQ ID NO: 959;
(280) a CDR1 comprising an amino acid sequence of SEQ ID NO: 960; a CDR2 comprising an amino acid sequence of SEQ ID NO: 961; and a CDR3 comprising an amino acid sequence of SEQ ID NO: 962;
(281) a CDR1 comprising an amino acid sequence of SEQ ID NO: 963; a CDR2 comprising an amino acid sequence of SEQ ID NO: 964; and a CDR3 comprising an amino acid sequence of SEQ ID NO: 965;
(282) a CDR1 comprising an amino acid sequence of SEQ ID NO: 966; a CDR2 comprising an amino acid sequence of SEQ ID NO: 967; and a CDR3 comprising an amino acid sequence of SEQ ID NO: 968;
(283) a CDR1 comprising an amino acid sequence of SEQ ID NO: 969; a CDR2 comprising an amino acid sequence of SEQ ID NO: 970; and a CDR3 comprising an amino acid sequence of SEQ ID NO: 971;
(284) a CDR1 comprising an amino acid sequence of SEQ ID NO: 972; a CDR2 comprising an amino acid sequence of SEQ ID NO: 973; and a CDR3 comprising an amino acid sequence of SEQ ID NO: 974;
(285) a CDR1 comprising an amino acid sequence of SEQ ID NO: 975; a CDR2 comprising an amino acid sequence of SEQ ID NO: 976; and a CDR3 comprising an amino acid sequence of SEQ ID NO: 977;
(286) a CDR1 comprising an amino acid sequence of SEQ ID NO: 978; a CDR2 comprising an amino acid sequence of SEQ ID NO: 979; and a CDR3 comprising an amino acid sequence of SEQ ID NO: 980;
(287) a CDR1 comprising an amino acid sequence of SEQ ID NO: 981; a CDR2 comprising an amino acid sequence of SEQ ID NO: 982; and a CDR3 comprising an amino acid sequence of SEQ ID NO: 983;
(288) a CDR1 comprising an amino acid sequence of SEQ ID NO: 984; a CDR2 comprising an amino acid sequence of SEQ ID NO: 985; and a CDR3 comprising an amino acid sequence of SEQ ID NO: 986;
(289) a CDR1 comprising an amino acid sequence of SEQ ID NO: 987; a CDR2 comprising an amino acid sequence of SEQ ID NO: 988; and a CDR3 comprising an amino acid sequence of SEQ ID NO: 989;
(290) a CDR1 comprising an amino acid sequence of SEQ ID NO: 990; a CDR2 comprising an amino acid sequence of SEQ ID NO: 991; and a CDR3 comprising an amino acid sequence of SEQ ID NO: 992;
(291) a CDR1 comprising an amino acid sequence of SEQ ID NO: 993; a CDR2 comprising an amino acid sequence of SEQ ID NO: 994; and a CDR3 comprising an amino acid sequence of SEQ ID NO: 995;
(292) a CDR1 comprising an amino acid sequence of SEQ ID NO: 996; a CDR2 comprising an amino acid sequence of SEQ ID NO: 997; and a CDR3 comprising an amino acid sequence of SEQ ID NO: 998;
(293) a CDR1 comprising an amino acid sequence of SEQ ID NO: 999; a CDR2 comprising an amino acid sequence of SEQ ID NO: 1000; and a CDR3 comprising an amino acid sequence of SEQ ID NO: 1001;
(294) a CDR1 comprising an amino acid sequence of SEQ ID NO: 1002; a CDR2 comprising an amino acid sequence of SEQ ID NO: 1003; and a CDR3 comprising an amino acid sequence of SEQ ID NO: 1004;
(295) a CDR1 comprising an amino acid sequence of SEQ ID NO: 1005; a CDR2 comprising an amino acid sequence of SEQ ID NO: 1006; and a CDR3 comprising an amino acid sequence of SEQ ID NO: 1007;
(296) a CDR1 comprising an amino acid sequence of SEQ ID NO: 1008; a CDR2 comprising an amino acid sequence of SEQ ID NO: 1009; and a CDR3 comprising an amino acid sequence of SEQ ID NO: 1010;
(297) a CDR1 comprising an amino acid sequence of SEQ ID NO: 1011; a CDR2 comprising an amino acid sequence of SEQ ID NO: 1012; and a CDR3 comprising an amino acid sequence of SEQ ID NO: 1013;
(298) a CDR1 comprising an amino acid sequence of SEQ ID NO: 1014; a CDR2 comprising an amino acid sequence of SEQ ID NO: 1015; and a CDR3 comprising an amino acid sequence of SEQ ID NO: 1016;
(299) a CDR1 comprising an amino acid sequence of SEQ ID NO: 1017; a CDR2 comprising an amino acid sequence of SEQ ID NO: 1018; and a CDR3 comprising an amino acid sequence of SEQ ID NO: 1019;
(300) a CDR1 comprising an amino acid sequence of SEQ ID NO: 1020; a CDR2 comprising an amino acid sequence of SEQ ID NO: 1021; and a CDR3 comprising an amino acid sequence of SEQ ID NO: 1022;
(301) a CDR1 comprising an amino acid sequence of SEQ ID NO: 1023; a CDR2 comprising an amino acid sequence of SEQ ID NO: 1024; and a CDR3 comprising an amino acid sequence of SEQ ID NO: 1025;
(302) a CDR1 comprising an amino acid sequence of SEQ ID NO: 1026; a CDR2 comprising an amino acid sequence of SEQ ID NO: 1027; and a CDR3 comprising an amino acid sequence of SEQ ID NO: 1028;
(303) a CDR1 comprising an amino acid sequence of SEQ ID NO: 1029; a CDR2 comprising an amino acid sequence of SEQ ID NO: 1030; and a CDR3 comprising an amino acid sequence of SEQ ID NO: 1031;
(304) a CDR1 comprising an amino acid sequence of SEQ ID NO: 1032; a CDR2 comprising an amino acid sequence of SEQ ID NO: 1033; and a CDR3 comprising an amino acid sequence of SEQ ID NO: 1034;
(305) a CDR1 comprising an amino acid sequence of SEQ ID NO: 1035; a CDR2 comprising an amino acid sequence of SEQ ID NO: 1036; and a CDR3 comprising an amino acid sequence of SEQ ID NO: 1037;
(306) a CDR1 comprising an amino acid sequence of SEQ ID NO: 1038; a CDR2 comprising an amino acid sequence of SEQ ID NO: 1039; and a CDR3 comprising an amino acid sequence of SEQ ID NO: 1040;
(307) a CDR1 comprising an amino acid sequence of SEQ ID NO: 1041; a CDR2 comprising an amino acid sequence of SEQ ID NO: 1042; and a CDR3 comprising an amino acid sequence of SEQ ID NO: 1043;
(308) a CDR1 comprising an amino acid sequence of SEQ ID NO: 1044; a CDR2 comprising an amino acid sequence of SEQ ID NO: 1045; and a CDR3 comprising an amino acid sequence of SEQ ID NO: 1046;
(309) a CDR1 comprising an amino acid sequence of SEQ ID NO: 1047; a CDR2 comprising an amino acid sequence of SEQ ID NO: 1048; and a CDR3 comprising an amino acid sequence of SEQ ID NO: 1049;
(310) a CDR1 comprising an amino acid sequence of SEQ ID NO: 1050; a CDR2 comprising an amino acid sequence of SEQ ID NO: 1051; and a CDR3 comprising an amino acid sequence of SEQ ID NO: 1052;
(311) a CDR1 comprising an amino acid sequence of SEQ ID NO: 1053; a CDR2 comprising an amino acid sequence of SEQ ID NO: 1054; and a CDR3 comprising an amino acid sequence of SEQ ID NO: 1055;
(312) a CDR1 comprising an amino acid sequence of SEQ ID NO: 1056; a CDR2 comprising an amino acid sequence of SEQ ID NO: 1057; and a CDR3 comprising an amino acid sequence of SEQ ID NO: 1058;
(313) a CDR1 comprising an amino acid sequence of SEQ ID NO: 1059; a CDR2 comprising an amino acid sequence of SEQ ID NO: 1060; and a CDR3 comprising an amino acid sequence of SEQ ID NO: 1061;
(314) a CDR1 comprising an amino acid sequence of SEQ ID NO: 1062; a CDR2 comprising an amino acid sequence of SEQ ID NO: 1063; and a CDR3 comprising an amino acid sequence of SEQ ID NO: 1064;
(315) a CDR1 comprising an amino acid sequence of SEQ ID NO: 1065; a CDR2 comprising an amino acid sequence of SEQ ID NO: 1066; and a CDR3 comprising an amino acid sequence of SEQ ID NO: 1067;
(316) a CDR1 comprising an amino acid sequence of SEQ ID NO: 1068; a CDR2 comprising an amino acid sequence of SEQ ID NO: 1069; and a CDR3 comprising an amino acid sequence of SEQ ID NO: 1070;
(317) a CDR1 comprising an amino acid sequence of SEQ ID NO: 1071; a CDR2 comprising an amino acid sequence of SEQ ID NO: 1072; and a CDR3 comprising an amino acid sequence of SEQ ID NO: 1073;
(318) a CDR1 comprising an amino acid sequence of SEQ ID NO: 1074; a CDR2 comprising an amino acid sequence of SEQ ID NO: 1075; and a CDR3 comprising an amino acid sequence of SEQ ID NO: 1076;
(319) a CDR1 comprising an amino acid sequence of SEQ ID NO: 1077; a CDR2 comprising an amino acid sequence of SEQ ID NO: 1078; and a CDR3 comprising an amino acid sequence of SEQ ID NO: 1079;
(320) a CDR1 comprising an amino acid sequence of SEQ ID NO: 1080; a CDR2 comprising an amino acid sequence of SEQ ID NO: 1081; and a CDR3 comprising an amino acid sequence of SEQ ID NO: 1082;
(321) a CDR1 comprising an amino acid sequence of SEQ ID NO: 1083; a CDR2 comprising an amino acid sequence of SEQ ID NO: 1084; and a CDR3 comprising an amino acid sequence of SEQ ID NO: 1085;
(322) a CDR1 comprising an amino acid sequence of SEQ ID NO: 1086; a CDR2 comprising an amino acid sequence of SEQ ID NO: 1087; and a CDR3 comprising an amino acid sequence of SEQ ID NO: 1088;
(323) a CDR1 comprising an amino acid sequence of SEQ ID NO: 1089; a CDR2 comprising an amino acid sequence of SEQ ID NO: 1090; and a CDR3 comprising an amino acid sequence of SEQ ID NO: 1091;
(324) a CDR1 comprising an amino acid sequence of SEQ ID NO: 1092; a CDR2 comprising an amino acid sequence of SEQ ID NO: 1093; and a CDR3 comprising an amino acid sequence of SEQ ID NO: 1094;
(325) a CDR1 comprising an amino acid sequence of SEQ ID NO: 1095; a CDR2 comprising an amino acid sequence of SEQ ID NO: 1096; and a CDR3 comprising an amino acid sequence of SEQ ID NO: 1097;
(326) a CDR1 comprising an amino acid sequence of SEQ ID NO: 1098; a CDR2 comprising an amino acid sequence of SEQ ID NO: 1099; and a CDR3 comprising an amino acid sequence of SEQ ID NO: 1100;
(327) a CDR1 comprising an amino acid sequence of SEQ ID NO: 1101; a CDR2 comprising an amino acid sequence of SEQ ID NO: 1102; and a CDR3 comprising an amino acid sequence of SEQ ID NO: 1103;
(328) a CDR1 comprising an amino acid sequence of SEQ ID NO: 1104; a CDR2 comprising an amino acid sequence of SEQ ID NO: 1105; and a CDR3 comprising an amino acid sequence of SEQ ID NO: 1106;
(329) a CDR1 comprising an amino acid sequence of SEQ ID NO: 1107; a CDR2 comprising an amino acid sequence of SEQ ID NO: 1108; and a CDR3 comprising an amino acid sequence of SEQ ID NO: 1109;
(330) a CDR1 comprising an amino acid sequence of SEQ ID NO: 1110; a CDR2 comprising an amino acid sequence of SEQ ID NO: 1111; and a CDR3 comprising an amino acid sequence of SEQ ID NO: 1112;
(331) a CDR1 comprising an amino acid sequence of SEQ ID NO: 1113; a CDR2 comprising an amino acid sequence of SEQ ID NO: 1114; and a CDR3 comprising an amino acid sequence of SEQ ID NO: 1115;
(332) a CDR1 comprising an amino acid sequence of SEQ ID NO: 1116; a CDR2 comprising an amino acid sequence of SEQ ID NO: 1117; and a CDR3 comprising an amino acid sequence of SEQ ID NO: 1118;
(333) a CDR1 comprising an amino acid sequence of SEQ ID NO: 1119; a CDR2 comprising an amino acid sequence of SEQ ID NO: 1120; and a CDR3 comprising an amino acid sequence of SEQ ID NO: 1121;
(334) a CDR1 comprising an amino acid sequence of SEQ ID NO: 1122; a CDR2 comprising an amino acid sequence of SEQ ID NO: 1123; and a CDR3 comprising an amino acid sequence of SEQ ID NO: 1124;
(335) a CDR1 comprising an amino acid sequence of SEQ ID NO: 1125; a CDR2 comprising an amino acid sequence of SEQ ID NO: 1126; and a CDR3 comprising an amino acid sequence of SEQ ID NO: 1127;
(336) a CDR1 comprising an amino acid sequence of SEQ ID NO: 1128; a CDR2 comprising an amino acid sequence of SEQ ID NO: 1129; and a CDR3 comprising an amino acid sequence of SEQ ID NO: 1130;
(337) a CDR1 comprising an amino acid sequence of SEQ ID NO: 1131; a CDR2 comprising an amino acid sequence of SEQ ID NO: 1132; and a CDR3 comprising an amino acid sequence of SEQ ID NO: 1133;
(338) a CDR1 comprising an amino acid sequence of SEQ ID NO: 1134; a CDR2 comprising an amino acid sequence of SEQ ID NO: 1135; and a CDR3 comprising an amino acid sequence of SEQ ID NO: 1136;
(339) a CDR1 comprising an amino acid sequence of SEQ ID NO: 1137; a CDR2 comprising an amino acid sequence of SEQ ID NO: 1138; and a CDR3 comprising an amino acid sequence of SEQ ID NO: 1139;
(340) a CDR1 comprising an amino acid sequence of SEQ ID NO: 1140; a CDR2 comprising an amino acid sequence of SEQ ID NO: 1141; and a CDR3 comprising an amino acid sequence of SEQ ID NO: 1142;
(341) a CDR1 comprising an amino acid sequence of SEQ ID NO: 1143; a CDR2 comprising an amino acid sequence of SEQ ID NO: 1144; and a CDR3 comprising an amino acid sequence of SEQ ID NO: 1145;
(342) a CDR1 comprising an amino acid sequence of SEQ ID NO: 1146; a CDR2 comprising an amino acid sequence of SEQ ID NO: 1147; and a CDR3 comprising an amino acid sequence of SEQ ID NO: 1148;
(343) a CDR1 comprising an amino acid sequence of SEQ ID NO: 1149; a CDR2 comprising an amino acid sequence of SEQ ID NO: 1150; and a CDR3 comprising an amino acid sequence of SEQ ID NO: 1151;
(344) a CDR1 comprising an amino acid sequence of SEQ ID NO: 1152; a CDR2 comprising an amino acid sequence of SEQ ID NO: 1153; and a CDR3 comprising an amino acid sequence of SEQ ID NO: 1154;
(345) a CDR1 comprising an amino acid sequence of SEQ ID NO: 1155; a CDR2 comprising an amino acid sequence of SEQ ID NO: 1156; and a CDR3 comprising an amino acid sequence of SEQ ID NO: 1157;
(346) a CDR1 comprising an amino acid sequence of SEQ ID NO: 1158; a CDR2 comprising an amino acid sequence of SEQ ID NO: 1159; and a CDR3 comprising an amino acid sequence of SEQ ID NO: 1160;
(347) a CDR1 comprising an amino acid sequence of SEQ ID NO: 1161; a CDR2 comprising an amino acid sequence of SEQ ID NO: 1162; and a CDR3 comprising an amino acid sequence of SEQ ID NO: 1163;
(348) a CDR1 comprising an amino acid sequence of SEQ ID NO: 1164; a CDR2 comprising an amino acid sequence of SEQ ID NO: 1165; and a CDR3 comprising an amino acid sequence of SEQ ID NO: 1166;
(349) a CDR1 comprising an amino acid sequence of SEQ ID NO: 1167; a CDR2 comprising an amino acid sequence of SEQ ID NO: 1168; and a CDR3 comprising an amino acid sequence of SEQ ID NO: 1169;
(350) a CDR1 comprising an amino acid sequence of SEQ ID NO: 1170; a CDR2 comprising an amino acid sequence of SEQ ID NO: 1171; and a CDR3 comprising an amino acid sequence of SEQ ID NO: 1172;
(351) a CDR1 comprising an amino acid sequence of SEQ ID NO: 1173; a CDR2 comprising an amino acid sequence of SEQ ID NO: 1174; and a CDR3 comprising an amino acid sequence of SEQ ID NO: 1175;
(352) a CDR1 comprising an amino acid sequence of SEQ ID NO: 1176; a CDR2 comprising an amino acid sequence of SEQ ID NO: 1177; and a CDR3 comprising an amino acid sequence of SEQ ID NO: 1178;
(353) a CDR1 comprising an amino acid sequence of SEQ ID NO: 1179; a CDR2 comprising an amino acid sequence of SEQ ID NO: 1180; and a CDR3 comprising an amino acid sequence of SEQ ID NO: 1181;
(354) a CDR1 comprising an amino acid sequence of SEQ ID NO: 1182; a CDR2 comprising an amino acid sequence of SEQ ID NO: 1183; and a CDR3 comprising an amino acid sequence of SEQ ID NO: 1184;
(355) a CDR1 comprising an amino acid sequence of SEQ ID NO: 1185; a CDR2 comprising an amino acid sequence of SEQ ID NO: 1186; and a CDR3 comprising an amino acid sequence of SEQ ID NO: 1187;
(356) a CDR1 comprising an amino acid sequence of SEQ ID NO: 1188; a CDR2 comprising an amino acid sequence of SEQ ID NO: 1189; and a CDR3 comprising an amino acid sequence of SEQ ID NO: 1190;
(357) a CDR1 comprising an amino acid sequence of SEQ ID NO: 1191; a CDR2 comprising an amino acid sequence of SEQ ID NO: 1192; and a CDR3 comprising an amino acid sequence of SEQ ID NO: 1193;
(358) a CDR1 comprising an amino acid sequence of SEQ ID NO: 1194; a CDR2 comprising an amino acid sequence of SEQ ID NO: 1195; and a CDR3 comprising an amino acid sequence of SEQ ID NO: 1196;
(359) a CDR1 comprising an amino acid sequence of SEQ ID NO: 1197; a CDR2 comprising an amino acid sequence of SEQ ID NO: 1198; and a CDR3 comprising an amino acid sequence of SEQ ID NO: 1199;
(360) a CDR1 comprising an amino acid sequence of SEQ ID NO: 1200; a CDR2 comprising an amino acid sequence of SEQ ID NO: 1201; and a CDR3 comprising an amino acid sequence of SEQ ID NO: 1202;
(361) a CDR1 comprising an amino acid sequence of SEQ ID NO: 1203; a CDR2 comprising an amino acid sequence of SEQ ID NO: 1204; and a CDR3 comprising an amino acid sequence of SEQ ID NO: 1205;
(362) a CDR1 comprising an amino acid sequence of SEQ ID NO: 1206; a CDR2 comprising an amino acid sequence of SEQ ID NO: 1207; and a CDR3 comprising an amino acid sequence of SEQ ID NO: 1208;
(363) a CDR1 comprising an amino acid sequence of SEQ ID NO: 1209; a CDR2 comprising an amino acid sequence of SEQ ID NO: 1210; and a CDR3 comprising an amino acid sequence of SEQ ID NO: 1211;
(364) a CDR1 comprising an amino acid sequence of SEQ ID NO: 1212; a CDR2 comprising an amino acid sequence of SEQ ID NO: 1213; and a CDR3 comprising an amino acid sequence of SEQ ID NO: 1214;
(365) a CDR1 comprising an amino acid sequence of SEQ ID NO: 1215; a CDR2 comprising an amino acid sequence of SEQ ID NO: 1216; and a CDR3 comprising an amino acid sequence of SEQ ID NO: 1217;
(366) a CDR1 comprising an amino acid sequence of SEQ ID NO: 1218; a CDR2 comprising an amino acid sequence of SEQ ID NO: 1219; and a CDR3 comprising an amino acid sequence of SEQ ID NO: 1220;
(367) a CDR1 comprising an amino acid sequence of SEQ ID NO: 1221; a CDR2 comprising an amino acid sequence of SEQ ID NO: 1222; and a CDR3 comprising an amino acid sequence of SEQ ID NO: 1223;
(368) a CDR1 comprising an amino acid sequence of SEQ ID NO: 1224; a CDR2 comprising an amino acid sequence of SEQ ID NO: 1225; and a CDR3 comprising an amino acid sequence of SEQ ID NO: 1226;
(369) a CDR1 comprising an amino acid sequence of SEQ ID NO: 1227; a CDR2 comprising an amino acid sequence of SEQ ID NO: 1228; and a CDR3 comprising an amino acid sequence of SEQ ID NO: 1229;
(370) a CDR1 comprising an amino acid sequence of SEQ ID NO: 1230; a CDR2 comprising an amino acid sequence of SEQ ID NO: 1231; and a CDR3 comprising an amino acid sequence of SEQ ID NO: 1232;
(371) a CDR1 comprising an amino acid sequence of SEQ ID NO: 1233; a CDR2 comprising an amino acid sequence of SEQ ID NO: 1234; and a CDR3 comprising an amino acid sequence of SEQ ID NO: 1235;
(372) a CDR1 comprising an amino acid sequence of SEQ ID NO: 1236; a CDR2 comprising an amino acid sequence of SEQ ID NO: 1237; and a CDR3 comprising an amino acid sequence of SEQ ID NO: 1238;
(373) a CDR1 comprising an amino acid sequence of SEQ ID NO: 1239; a CDR2 comprising an amino acid sequence of SEQ ID NO: 1240; and a CDR3 comprising an amino acid sequence of SEQ ID NO: 1241;
(374) a CDR1 comprising an amino acid sequence of SEQ ID NO: 1242; a CDR2 comprising an amino acid sequence of SEQ ID NO: 1243; and a CDR3 comprising an amino acid sequence of SEQ ID NO: 1244;
(375) a CDR1 comprising an amino acid sequence of SEQ ID NO: 1245; a CDR2 comprising an amino acid sequence of SEQ ID NO: 1246; and a CDR3 comprising an amino acid sequence of SEQ ID NO: 1247;
(376) a CDR1 comprising an amino acid sequence of SEQ ID NO: 1248; a CDR2 comprising an amino acid sequence of SEQ ID NO: 1249; and a CDR3 comprising an amino acid sequence of SEQ ID NO: 1250;
(377) a CDR1 comprising an amino acid sequence of SEQ ID NO: 1251; a CDR2 comprising an amino acid sequence of SEQ ID NO: 1252; and a CDR3 comprising an amino acid sequence of SEQ ID NO: 1253;
(378) a CDR1 comprising an amino acid sequence of SEQ ID NO: 1254; a CDR2 comprising an amino acid sequence of SEQ ID NO: 1255; and a CDR3 comprising an amino acid sequence of SEQ ID NO: 1256;
(379) a CDR1 comprising an amino acid sequence of SEQ ID NO: 1257; a CDR2 comprising an amino acid sequence of SEQ ID NO: 1258; and a CDR3 comprising an amino acid sequence of SEQ ID NO: 1259;
(380) a CDR1 comprising an amino acid sequence of SEQ ID NO: 1260; a CDR2 comprising an amino acid sequence of SEQ ID NO: 1261; and a CDR3 comprising an amino acid sequence of SEQ ID NO: 1262;
(381) a CDR1 comprising an amino acid sequence of SEQ ID NO: 1263; a CDR2 comprising an amino acid sequence of SEQ ID NO: 1264; and a CDR3 comprising an amino acid sequence of SEQ ID NO: 1265;
(382) a CDR1 comprising an amino acid sequence of SEQ ID NO: 1266; a CDR2 comprising an amino acid sequence of SEQ ID NO: 1267; and a CDR3 comprising an amino acid sequence of SEQ ID NO: 1268;
(383) a CDR1 comprising an amino acid sequence of SEQ ID NO: 1269; a CDR2 comprising an amino acid sequence of SEQ ID NO: 1270; and a CDR3 comprising an amino acid sequence of SEQ ID NO: 1271;
(384) a CDR1 comprising an amino acid sequence of SEQ ID NO: 1272; a CDR2 comprising an amino acid sequence of SEQ ID NO: 1273; and a CDR3 comprising an amino acid sequence of SEQ ID NO: 1274;
(385) a CDR1 comprising an amino acid sequence of SEQ ID NO: 1275; a CDR2 comprising an amino acid sequence of SEQ ID NO: 1276; and a CDR3 comprising an amino acid sequence of SEQ ID NO: 1277;
(386) a CDR1 comprising an amino acid sequence of SEQ ID NO: 1278; a CDR2 comprising an amino acid sequence of SEQ ID NO: 1279; and a CDR3 comprising an amino acid sequence of SEQ ID NO: 1280;
(387) a CDR1 comprising an amino acid sequence of SEQ ID NO: 1281; a CDR2 comprising an amino acid sequence of SEQ ID NO: 1282; and a CDR3 comprising an amino acid sequence of SEQ ID NO: 1283;
(388) a CDR1 comprising an amino acid sequence of SEQ ID NO: 1284; a CDR2 comprising an amino acid sequence of SEQ ID NO: 1285; and a CDR3 comprising an amino acid sequence of SEQ ID NO: 1286;
(389) a CDR1 comprising an amino acid sequence of SEQ ID NO: 1287; a CDR2 comprising an amino acid sequence of SEQ ID NO: 1288; and a CDR3 comprising an amino acid sequence of SEQ ID NO: 1289;
(390) a CDR1 comprising an amino acid sequence of SEQ ID NO: 1290; a CDR2 comprising an amino acid sequence of SEQ ID NO: 1291; and a CDR3 comprising an amino acid sequence of SEQ ID NO: 1292;
(391) a CDR1 comprising an amino acid sequence of SEQ ID NO: 1293; a CDR2 comprising an amino acid sequence of SEQ ID NO: 1294; and a CDR3 comprising an amino acid sequence of SEQ ID NO: 1295;
(392) a CDR1 comprising an amino acid sequence of SEQ ID NO: 1296; a CDR2 comprising an amino acid sequence of SEQ ID NO: 1297; and a CDR3 comprising an amino acid sequence of SEQ ID NO: 1298;
(393) a CDR1 comprising an amino acid sequence of SEQ ID NO: 1299; a CDR2 comprising an amino acid sequence of SEQ ID NO: 1300; and a CDR3 comprising an amino acid sequence of SEQ ID NO: 1301;
(394) a CDR1 comprising an amino acid sequence of SEQ ID NO: 1302; a CDR2 comprising an amino acid sequence of SEQ ID NO: 1303; and a CDR3 comprising an amino acid sequence of SEQ ID NO: 1304;
(395) a CDR1 comprising an amino acid sequence of SEQ ID NO: 1305; a CDR2 comprising an amino acid sequence of SEQ ID NO: 1306; and a CDR3 comprising an amino acid sequence of SEQ ID NO: 1307;
(396) a CDR1 comprising an amino acid sequence of SEQ ID NO: 1308; a CDR2 comprising an amino acid sequence of SEQ ID NO: 1309; and a CDR3 comprising an amino acid sequence of SEQ ID NO: 1310;
(397) a CDR1 comprising an amino acid sequence of SEQ ID NO: 1311; a CDR2 comprising an amino acid sequence of SEQ ID NO: 1312; and a CDR3 comprising an amino acid sequence of SEQ ID NO: 1313;
(398) a CDR1 comprising an amino acid sequence of SEQ ID NO: 1314; a CDR2 comprising an amino acid sequence of SEQ ID NO: 1315; and a CDR3 comprising an amino acid sequence of SEQ ID NO: 1316;
(399) a CDR1 comprising an amino acid sequence of SEQ ID NO: 1317; a CDR2 comprising an amino acid sequence of SEQ ID NO: 1318; and a CDR3 comprising an amino acid sequence of SEQ ID NO: 1319;
(400) a CDR1 comprising an amino acid sequence of SEQ ID NO: 1320; a CDR2 comprising an amino acid sequence of SEQ ID NO: 1321; and a CDR3 comprising an amino acid sequence of SEQ ID NO: 1322;
(401) a CDR1 comprising an amino acid sequence of SEQ ID NO: 1323; a CDR2 comprising an amino acid sequence of SEQ ID NO: 1324; and a CDR3 comprising an amino acid sequence of SEQ ID NO: 1325;
(402) a CDR1 comprising an amino acid sequence of SEQ ID NO: 1326; a CDR2 comprising an amino acid sequence of SEQ ID NO: 1327; and a CDR3 comprising an amino acid sequence of SEQ ID NO: 1328;
(403) a CDR1 comprising an amino acid sequence of SEQ ID NO: 1329; a CDR2 comprising an amino acid sequence of SEQ ID NO: 1330; and a CDR3 comprising an amino acid sequence of SEQ ID NO: 1331;
(404) a CDR1 comprising an amino acid sequence of SEQ ID NO: 1332; a CDR2 comprising an amino acid sequence of SEQ ID NO: 1333; and a CDR3 comprising an amino acid sequence of SEQ ID NO: 1334;
(405) a CDR1 comprising an amino acid sequence of SEQ ID NO: 1335; a CDR2 comprising an amino acid sequence of SEQ ID NO: 1336; and a CDR3 comprising an amino acid sequence of SEQ ID NO: 1337;
(406) a CDR1 comprising an amino acid sequence of SEQ ID NO: 1338; a CDR2 comprising an amino acid sequence of SEQ ID NO: 1339; and a CDR3 comprising an amino acid sequence of SEQ ID NO: 1340;
(407) a CDR1 comprising an amino acid sequence of SEQ ID NO: 1341; a CDR2 comprising an amino acid sequence of SEQ ID NO: 1342; and a CDR3 comprising an amino acid sequence of SEQ ID NO: 1343;
(408) a CDR1 comprising an amino acid sequence of SEQ ID NO: 1344; a CDR2 comprising an amino acid sequence of SEQ ID NO: 1345; and a CDR3 comprising an amino acid sequence of SEQ ID NO: 1346;
(409) a CDR1 comprising an amino acid sequence of SEQ ID NO: 1347; a CDR2 comprising an amino acid sequence of SEQ ID NO: 1348; and a CDR3 comprising an amino acid sequence of SEQ ID NO: 1349;
(410) a CDR1 comprising an amino acid sequence of SEQ ID NO: 1350; a CDR2 comprising an amino acid sequence of SEQ ID NO: 1351; and a CDR3 comprising an amino acid sequence of SEQ ID NO: 1352;
(411) a CDR1 comprising an amino acid sequence of SEQ ID NO: 1353; a CDR2 comprising an amino acid sequence of SEQ ID NO: 1354; and a CDR3 comprising an amino acid sequence of SEQ ID NO: 1355;
(412) a CDR1 comprising an amino acid sequence of SEQ ID NO: 1356; a CDR2 comprising an amino acid sequence of SEQ ID NO: 1357; and a CDR3 comprising an amino acid sequence of SEQ ID NO: 1358;
(413) a CDR1 comprising an amino acid sequence of SEQ ID NO: 1359; a CDR2 comprising an amino acid sequence of SEQ ID NO: 1360; and a CDR3 comprising an amino acid sequence of SEQ ID NO: 1361;
(414) a CDR1 comprising an amino acid sequence of SEQ ID NO: 1362; a CDR2 comprising an amino acid sequence of SEQ ID NO: 1363; and a CDR3 comprising an amino acid sequence of SEQ ID NO: 1364;
(415) a CDR1 comprising an amino acid sequence of SEQ ID NO: 1365; a CDR2 comprising an amino acid sequence of SEQ ID NO: 1366; and a CDR3 comprising an amino acid sequence of SEQ ID NO: 1367;
(416) a CDR1 comprising an amino acid sequence of SEQ ID NO: 1368; a CDR2 comprising an amino acid sequence of SEQ ID NO: 1369; and a CDR3 comprising an amino acid sequence of SEQ ID NO: 1370;
(417) a CDR1 comprising an amino acid sequence of SEQ ID NO: 1371; a CDR2 comprising an amino acid sequence of SEQ ID NO: 1372; and a CDR3 comprising an amino acid sequence of SEQ ID NO: 1373;
(418) a CDR1 comprising an amino acid sequence of SEQ ID NO: 1374; a CDR2 comprising an amino acid sequence of SEQ ID NO: 1375; and a CDR3 comprising an amino acid sequence of SEQ ID NO: 1376;
(419) a CDR1 comprising an amino acid sequence of SEQ ID NO: 1377; a CDR2 comprising an amino acid sequence of SEQ ID NO: 1378; and a CDR3 comprising an amino acid sequence of SEQ ID NO: 1379;
(420) a CDR1 comprising an amino acid sequence of SEQ ID NO: 1380; a CDR2 comprising an amino acid sequence of SEQ ID NO: 1381; and a CDR3 comprising an amino acid sequence of SEQ ID NO: 1382;
(421) a CDR1 comprising an amino acid sequence of SEQ ID NO: 1383; a CDR2 comprising an amino acid sequence of SEQ ID NO: 1384; and a CDR3 comprising an amino acid sequence of SEQ ID NO: 1385;
(422) a CDR1 comprising an amino acid sequence of SEQ ID NO: 1386; a CDR2 comprising an amino acid sequence of SEQ ID NO: 1387; and a CDR3 comprising an amino acid sequence of SEQ ID NO: 1388;
(423) a CDR1 comprising an amino acid sequence of SEQ ID NO: 1389; a CDR2 comprising an amino acid sequence of SEQ ID NO: 1390; and a CDR3 comprising an amino acid sequence of SEQ ID NO: 1391;
(424) a CDR1 comprising an amino acid sequence of SEQ ID NO: 1392; a CDR2 comprising an amino acid sequence of SEQ ID NO: 1393; and a CDR3 comprising an amino acid sequence of SEQ ID NO: 1394;
(425) a CDR1 comprising an amino acid sequence of SEQ ID NO: 1395; a CDR2 comprising an amino acid sequence of SEQ ID NO: 1396; and a CDR3 comprising an amino acid sequence of SEQ ID NO: 1397;
(426) a CDR1 comprising an amino acid sequence of SEQ ID NO: 1398; a CDR2 comprising an amino acid sequence of SEQ ID NO: 1399; and a CDR3 comprising an amino acid sequence of SEQ ID NO: 1400;
(427) a CDR1 comprising an amino acid sequence of SEQ ID NO: 1401; a CDR2 comprising an amino acid sequence of SEQ ID NO: 1402; and a CDR3 comprising an amino acid sequence of SEQ ID NO: 1403;
(428) a CDR1 comprising an amino acid sequence of SEQ ID NO: 1404; a CDR2 comprising an amino acid sequence of SEQ ID NO: 1405; and a CDR3 comprising an amino acid sequence of SEQ ID NO: 1406;
(429) a CDR1 comprising an amino acid sequence of SEQ ID NO: 1407; a CDR2 comprising an amino acid sequence of SEQ ID NO: 1408; and a CDR3 comprising an amino acid sequence of SEQ ID NO: 1409;
(430) a CDR1 comprising an amino acid sequence of SEQ ID NO: 1410; a CDR2 comprising an amino acid sequence of SEQ ID NO: 1411; and a CDR3 comprising an amino acid sequence of SEQ ID NO: 1412;
(431) a CDR1 comprising an amino acid sequence of SEQ ID NO: 1413; a CDR2 comprising an amino acid sequence of SEQ ID NO: 1414; and a CDR3 comprising an amino acid sequence of SEQ ID NO: 1415;
(432) a CDR1 comprising an amino acid sequence of SEQ ID NO: 1416; a CDR2 comprising an amino acid sequence of SEQ ID NO: 1417; and a CDR3 comprising an amino acid sequence of SEQ ID NO: 1418;
(433) a CDR1 comprising an amino acid sequence of SEQ ID NO: 1419; a CDR2 comprising an amino acid sequence of SEQ ID NO: 1420; and a CDR3 comprising an amino acid sequence of SEQ ID NO: 1421;
(434) a CDR1 comprising an amino acid sequence of SEQ ID NO: 1422; a CDR2 comprising an amino acid sequence of SEQ ID NO: 1423; and a CDR3 comprising an amino acid sequence of SEQ ID NO: 1424;
(435) a CDR1 comprising an amino acid sequence of SEQ ID NO: 1425; a CDR2 comprising an amino acid sequence of SEQ ID NO: 1426; and a CDR3 comprising an amino acid sequence of SEQ ID NO: 1427;
(436) a CDR1 comprising an amino acid sequence of SEQ ID NO: 1428; a CDR2 comprising an amino acid sequence of SEQ ID NO: 1429; and a CDR3 comprising an amino acid sequence of SEQ ID NO: 1430;
(437) a CDR1 comprising an amino acid sequence of SEQ ID NO: 1431; a CDR2 comprising an amino acid sequence of SEQ ID NO: 1432; and a CDR3 comprising an amino acid sequence of SEQ ID NO: 1433;
(438) a CDR1 comprising an amino acid sequence of SEQ ID NO: 1434; a CDR2 comprising an amino acid sequence of SEQ ID NO: 1435; and a CDR3 comprising an amino acid sequence of SEQ ID NO: 1436;
(439) a CDR1 comprising an amino acid sequence of SEQ ID NO: 1437; a CDR2 comprising an amino acid sequence of SEQ ID NO: 1438; and a CDR3 comprising an amino acid sequence of SEQ ID NO: 1439;
(440) a CDR1 comprising an amino acid sequence of SEQ ID NO: 1440; a CDR2 comprising an amino acid sequence of SEQ ID NO: 1441; and a CDR3 comprising an amino acid sequence of SEQ ID NO: 1442;
(441) a CDR1 comprising an amino acid sequence of SEQ ID NO: 1443; a CDR2 comprising an amino acid sequence of SEQ ID NO: 1444; and a CDR3 comprising an amino acid sequence of SEQ ID NO: 1445;
(442) a CDR1 comprising an amino acid sequence of SEQ ID NO: 1446; a CDR2 comprising an amino acid sequence of SEQ ID NO: 1447; and a CDR3 comprising an amino acid sequence of SEQ ID NO: 1448;
(443) a CDR1 comprising an amino acid sequence of SEQ ID NO: 1449; a CDR2 comprising an amino acid sequence of SEQ ID NO: 1450; and a CDR3 comprising an amino acid sequence of SEQ ID NO: 1451;
(444) a CDR1 comprising an amino acid sequence of SEQ ID NO: 1452; a CDR2 comprising an amino acid sequence of SEQ ID NO: 1453; and a CDR3 comprising an amino acid sequence of SEQ ID NO: 1454;
(445) a CDR1 comprising an amino acid sequence of SEQ ID NO: 1455; a CDR2 comprising an amino acid sequence of SEQ ID NO: 1456; and a CDR3 comprising an amino acid sequence of SEQ ID NO: 1457;
(446) a CDR1 comprising an amino acid sequence of SEQ ID NO: 1458; a CDR2 comprising an amino acid sequence of SEQ ID NO: 1459; and a CDR3 comprising an amino acid sequence of SEQ ID NO: 1460;
(447) a CDR1 comprising an amino acid sequence of SEQ ID NO: 1461; a CDR2 comprising an amino acid sequence of SEQ ID NO: 1462; and a CDR3 comprising an amino acid sequence of SEQ ID NO: 1463;
(448) a CDR1 comprising an amino acid sequence of SEQ ID NO: 1464; a CDR2 comprising an amino acid sequence of SEQ ID NO: 1465; and a CDR3 comprising an amino acid sequence of SEQ ID NO: 1466;
(449) a CDR1 comprising an amino acid sequence of SEQ ID NO: 1467; a CDR2 comprising an amino acid sequence of SEQ ID NO: 1468; and a CDR3 comprising an amino acid sequence of SEQ ID NO: 1469;
(450) a CDR1 comprising an amino acid sequence of SEQ ID NO: 1470; a CDR2 comprising an amino acid sequence of SEQ ID NO: 1471; and a CDR3 comprising an amino acid sequence of SEQ ID NO: 1472;
(451) a CDR1 comprising an amino acid sequence of SEQ ID NO: 1473; a CDR2 comprising an amino acid sequence of SEQ ID NO: 1474; and a CDR3 comprising an amino acid sequence of SEQ ID NO: 1475;
(452) a CDR1 comprising an amino acid sequence of SEQ ID NO: 1476; a CDR2 comprising an amino acid sequence of SEQ ID NO: 1477; and a CDR3 comprising an amino acid sequence of SEQ ID NO: 1478;
(453) a CDR1 comprising an amino acid sequence of SEQ ID NO: 1479; a CDR2 comprising an amino acid sequence of SEQ ID NO: 1480; and a CDR3 comprising an amino acid sequence of SEQ ID NO: 1481;
(454) a CDR1 comprising an amino acid sequence of SEQ ID NO: 1482; a CDR2 comprising an amino acid sequence of SEQ ID NO: 1483; and a CDR3 comprising an amino acid sequence of SEQ ID NO: 1484;
(455) a CDR1 comprising an amino acid sequence of SEQ ID NO: 1485; a CDR2 comprising an amino acid sequence of SEQ ID NO: 1486; and a CDR3 comprising an amino acid sequence of SEQ ID NO: 1487;
(456) a CDR1 comprising an amino acid sequence of SEQ ID NO: 1488; a CDR2 comprising an amino acid sequence of SEQ ID NO: 1489; and a CDR3 comprising an amino acid sequence of SEQ ID NO: 1490;
(457) a CDR1 comprising an amino acid sequence of SEQ ID NO: 1491; a CDR2 comprising an amino acid sequence of SEQ ID NO: 1492; and a CDR3 comprising an amino acid sequence of SEQ ID NO: 1493;
(458) a CDR1 comprising an amino acid sequence of SEQ ID NO: 1494; a CDR2 comprising an amino acid sequence of SEQ ID NO: 1495; and a CDR3 comprising an amino acid sequence of SEQ ID NO: 1496;
(459) a CDR1 comprising an amino acid sequence of SEQ ID NO: 1497; a CDR2 comprising an amino acid sequence of SEQ ID NO: 1498; and a CDR3 comprising an amino acid sequence of SEQ ID NO: 1499;
(460) a CDR1 comprising an amino acid sequence of SEQ ID NO: 1500; a CDR2 comprising an amino acid sequence of SEQ ID NO: 1501; and a CDR3 comprising an amino acid sequence of SEQ ID NO: 1502;
(461) a CDR1 comprising an amino acid sequence of SEQ ID NO: 1503; a CDR2 comprising an amino acid sequence of SEQ ID NO: 1504; and a CDR3 comprising an amino acid sequence of SEQ ID NO: 1505;
(462) a CDR1 comprising an amino acid sequence of SEQ ID NO: 1506; a CDR2 comprising an amino acid sequence of SEQ ID NO: 1507; and a CDR3 comprising an amino acid sequence of SEQ ID NO: 1508;
(463) a CDR1 comprising an amino acid sequence of SEQ ID NO: 1509; a CDR2 comprising an amino acid sequence of SEQ ID NO: 1510; and a CDR3 comprising an amino acid sequence of SEQ ID NO: 1511;
(464) a CDR1 comprising an amino acid sequence of SEQ ID NO: 1512; a CDR2 comprising an amino acid sequence of SEQ ID NO: 1513; and a CDR3 comprising an amino acid sequence of SEQ ID NO: 1514;
(465) a CDR1 comprising an amino acid sequence of SEQ ID NO: 1515; a CDR2 comprising an amino acid sequence of SEQ ID NO: 1516; and a CDR3 comprising an amino acid sequence of SEQ ID NO: 1517;
(466) a CDR1 comprising an amino acid sequence of SEQ ID NO: 1518; a CDR2 comprising an amino acid sequence of SEQ ID NO: 1519; and a CDR3 comprising an amino acid sequence of SEQ ID NO: 1520;
(467) a CDR1 comprising an amino acid sequence of SEQ ID NO: 1521; a CDR2 comprising an amino acid sequence of SEQ ID NO: 1522; and a CDR3 comprising an amino acid sequence of SEQ ID NO: 1523;
(468) a CDR1 comprising an amino acid sequence of SEQ ID NO: 1524; a CDR2 comprising an amino acid sequence of SEQ ID NO: 1525; and a CDR3 comprising an amino acid sequence of SEQ ID NO: 1526;
(469) a CDR1 comprising an amino acid sequence of SEQ ID NO: 1527; a CDR2 comprising an amino acid sequence of SEQ ID NO: 1528; and a CDR3 comprising an amino acid sequence of SEQ ID NO: 1529;
(470) a CDR1 comprising an amino acid sequence of SEQ ID NO: 1530; a CDR2 comprising an amino acid sequence of SEQ ID NO: 1531; and a CDR3 comprising an amino acid sequence of SEQ ID NO: 1532;
(471) a CDR1 comprising an amino acid sequence of SEQ ID NO: 1533; a CDR2 comprising an amino acid sequence of SEQ ID NO: 1534; and a CDR3 comprising an amino acid sequence of SEQ ID NO: 1535;
(472) a CDR1 comprising an amino acid sequence of SEQ ID NO: 1536; a CDR2 comprising an amino acid sequence of SEQ ID NO: 1537; and a CDR3 comprising an amino acid sequence of SEQ ID NO: 1538;
(473) a CDR1 comprising an amino acid sequence of SEQ ID NO: 1539; a CDR2 comprising an amino acid sequence of SEQ ID NO: 1540; and a CDR3 comprising an amino acid sequence of SEQ ID NO: 1541;
(474) a CDR1 comprising an amino acid sequence of SEQ ID NO: 1542; a CDR2 comprising an amino acid sequence of SEQ ID NO: 1543; and a CDR3 comprising an amino acid sequence of SEQ ID NO: 1544;
(475) a CDR1 comprising an amino acid sequence of SEQ ID NO: 1545; a CDR2 comprising an amino acid sequence of SEQ ID NO: 1546; and a CDR3 comprising an amino acid sequence of SEQ ID NO: 1547;
(476) a CDR1 comprising an amino acid sequence of SEQ ID NO: 1548; a CDR2 comprising an amino acid sequence of SEQ ID NO: 1549; and a CDR3 comprising an amino acid sequence of SEQ ID NO: 1550;
(477) a CDR1 comprising an amino acid sequence of SEQ ID NO: 1551; a CDR2 comprising an amino acid sequence of SEQ ID NO: 1552; and a CDR3 comprising an amino acid sequence of SEQ ID NO: 1553;
(478) a CDR1 comprising an amino acid sequence of SEQ ID NO: 1554; a CDR2 comprising an amino acid sequence of SEQ ID NO: 1555; and a CDR3 comprising an amino acid sequence of SEQ ID NO: 1556;
(479) a CDR1 comprising an amino acid sequence of SEQ ID NO: 1557; a CDR2 comprising an amino acid sequence of SEQ ID NO: 1558; and a CDR3 comprising an amino acid sequence of SEQ ID NO: 1559;
(480) a CDR1 comprising an amino acid sequence of SEQ ID NO: 1560; a CDR2 comprising an amino acid sequence of SEQ ID NO: 1561; and a CDR3 comprising an amino acid sequence of SEQ ID NO: 1562;
(481) a CDR1 comprising an amino acid sequence of SEQ ID NO: 1563; a CDR2 comprising an amino acid sequence of SEQ ID NO: 1564; and a CDR3 comprising an amino acid sequence of SEQ ID NO: 1565;
(482) a CDR1 comprising an amino acid sequence of SEQ ID NO: 1566; a CDR2 comprising an amino acid sequence of SEQ ID NO: 1567; and a CDR3 comprising an amino acid sequence of SEQ ID NO: 1568;
(483) a CDR1 comprising an amino acid sequence of SEQ ID NO: 1569; a CDR2 comprising an amino acid sequence of SEQ ID NO: 1570; and a CDR3 comprising an amino acid sequence of SEQ ID NO: 1571;
(484) a CDR1 comprising an amino acid sequence of SEQ ID NO: 1572; a CDR2 comprising an amino acid sequence of SEQ ID NO: 1573; and a CDR3 comprising an amino acid sequence of SEQ ID NO: 1574;
(485) a CDR1 comprising an amino acid sequence of SEQ ID NO: 1575; a CDR2 comprising an amino acid sequence of SEQ ID NO: 1576; and a CDR3 comprising an amino acid sequence of SEQ ID NO: 1577;
(486) a CDR1 comprising an amino acid sequence of SEQ ID NO: 1578; a CDR2 comprising an amino acid sequence of SEQ ID NO: 1579; and a CDR3 comprising an amino acid sequence of SEQ ID NO: 1580;
(487) a CDR1 comprising an amino acid sequence of SEQ ID NO: 1581; a CDR2 comprising an amino acid sequence of SEQ ID NO: 1582; and a CDR3 comprising an amino acid sequence of SEQ ID NO: 1583;
(488) a CDR1 comprising an amino acid sequence of SEQ ID NO: 1584; a CDR2 comprising an amino acid sequence of SEQ ID NO: 1585; and a CDR3 comprising an amino acid sequence of SEQ ID NO: 1586;
(489) a CDR1 comprising an amino acid sequence of SEQ ID NO: 1587; a CDR2 comprising an amino acid sequence of SEQ ID NO: 1588; and a CDR3 comprising an amino acid sequence of SEQ ID NO: 1589;
(490) a CDR1 comprising an amino acid sequence of SEQ ID NO: 1590; a CDR2 comprising an amino acid sequence of SEQ ID NO: 1591; and a CDR3 comprising an amino acid sequence of SEQ ID NO: 1592;
(491) a CDR1 comprising an amino acid sequence of SEQ ID NO: 1593; a CDR2 comprising an amino acid sequence of SEQ ID NO: 1594; and a CDR3 comprising an amino acid sequence of SEQ ID NO: 1595;
(492) a CDR1 comprising an amino acid sequence of SEQ ID NO: 1596; a CDR2 comprising an amino acid sequence of SEQ ID NO: 1597; and a CDR3 comprising an amino acid sequence of SEQ ID NO: 1598;
(493) a CDR1 comprising an amino acid sequence of SEQ ID NO: 1599; a CDR2 comprising an amino acid sequence of SEQ ID NO: 1600; and a CDR3 comprising an amino acid sequence of SEQ ID NO: 1601;
(494) a CDR1 comprising an amino acid sequence of SEQ ID NO: 1602; a CDR2 comprising an amino acid sequence of SEQ ID NO: 1603; and a CDR3 comprising an amino acid sequence of SEQ ID NO: 1604;
(495) a CDR1 comprising an amino acid sequence of SEQ ID NO: 1605; a CDR2 comprising an amino acid sequence of SEQ ID NO: 1606; and a CDR3 comprising an amino acid sequence of SEQ ID NO: 1607;
(496) a CDR1 comprising an amino acid sequence of SEQ ID NO: 1608; a CDR2 comprising an amino acid sequence of SEQ ID NO: 1609; and a CDR3 comprising an amino acid sequence of SEQ ID NO: 1610;
(497) a CDR1 comprising an amino acid sequence of SEQ ID NO: 1611; a CDR2 comprising an amino acid sequence of SEQ ID NO: 1612; and a CDR3 comprising an amino acid sequence of SEQ ID NO: 1613;
(498) a CDR1 comprising an amino acid sequence of SEQ ID NO: 1614; a CDR2 comprising an amino acid sequence of SEQ ID NO: 1615; and a CDR3 comprising an amino acid sequence of SEQ ID NO: 1616;
(499) a CDR1 comprising an amino acid sequence of SEQ ID NO: 1617; a CDR2 comprising an amino acid sequence of SEQ ID NO: 1618; and a CDR3 comprising an amino acid sequence of SEQ ID NO: 1619;
(500) a CDR1 comprising an amino acid sequence of SEQ ID NO: 1620; a CDR2 comprising an amino acid sequence of SEQ ID NO: 1621; and a CDR3 comprising an amino acid sequence of SEQ ID NO: 1622;
(501) a CDR1 comprising an amino acid sequence of SEQ ID NO: 1623; a CDR2 comprising an amino acid sequence of SEQ ID NO: 1624; and a CDR3 comprising an amino acid sequence of SEQ ID NO: 1625;
(502) a CDR1 comprising an amino acid sequence of SEQ ID NO: 1626; a CDR2 comprising an amino acid sequence of SEQ ID NO: 1627; and a CDR3 comprising an amino acid sequence of SEQ ID NO: 1628;
(503) a CDR1 comprising an amino acid sequence of SEQ ID NO: 1629; a CDR2 comprising an amino acid sequence of SEQ ID NO: 1630; and a CDR3 comprising an amino acid sequence of SEQ ID NO: 1631;
(504) a CDR1 comprising an amino acid sequence of SEQ ID NO: 1632; a CDR2 comprising an amino acid sequence of SEQ ID NO: 1633; and a CDR3 comprising an amino acid sequence of SEQ ID NO: 1634;
(505) a CDR1 comprising an amino acid sequence of SEQ ID NO: 1635; a CDR2 comprising an amino acid sequence of SEQ ID NO: 1636; and a CDR3 comprising an amino acid sequence of SEQ ID NO: 1637;
(506) a CDR1 comprising an amino acid sequence of SEQ ID NO: 1638; a CDR2 comprising an amino acid sequence of SEQ ID NO: 1639; and a CDR3 comprising an amino acid sequence of SEQ ID NO: 1640;
(507) a CDR1 comprising an amino acid sequence of SEQ ID NO: 1641; a CDR2 comprising an amino acid sequence of SEQ ID NO: 1642; and a CDR3 comprising an amino acid sequence of SEQ ID NO: 1643;
(508) a CDR1 comprising an amino acid sequence of SEQ ID NO: 1644; a CDR2 comprising an amino acid sequence of SEQ ID NO: 1645; and a CDR3 comprising an amino acid sequence of SEQ ID NO: 1646;
(509) a CDR1 comprising an amino acid sequence of SEQ ID NO: 1647; a CDR2 comprising an amino acid sequence of SEQ ID NO: 1648; and a CDR3 comprising an amino acid sequence of SEQ ID NO: 1649;
(510) a CDR1 comprising an amino acid sequence of SEQ ID NO: 1650; a CDR2 comprising an amino acid sequence of SEQ ID NO: 1651; and a CDR3 comprising an amino acid sequence of SEQ ID NO: 1652;
(511) a CDR1 comprising an amino acid sequence of SEQ ID NO: 1653; a CDR2 comprising an amino acid sequence of SEQ ID NO: 1654; and a CDR3 comprising an amino acid sequence of SEQ ID NO: 1655;
(512) a CDR1 comprising an amino acid sequence of SEQ ID NO: 1656; a CDR2 comprising an amino acid sequence of SEQ ID NO: 1657; and a CDR3 comprising an amino acid sequence of SEQ ID NO: 1658;
(513) a CDR1 comprising an amino acid sequence of SEQ ID NO: 1659; a CDR2 comprising an amino acid sequence of SEQ ID NO: 1660; and a CDR3 comprising an amino acid sequence of SEQ ID NO: 1661;
(514) a CDR1 comprising an amino acid sequence of SEQ ID NO: 1662; a CDR2 comprising an amino acid sequence of SEQ ID NO: 1663; and a CDR3 comprising an amino acid sequence of SEQ ID NO: 1664;
(515) a CDR1 comprising an amino acid sequence of SEQ ID NO: 1665; a CDR2 comprising an amino acid sequence of SEQ ID NO: 1666; and a CDR3 comprising an amino acid sequence of SEQ ID NO: 1667;
(516) a CDR1 comprising an amino acid sequence of SEQ ID NO: 1668; a CDR2 comprising an amino acid sequence of SEQ ID NO: 1669; and a CDR3 comprising an amino acid sequence of SEQ ID NO: 1670;
(517) a CDR1 comprising an amino acid sequence of SEQ ID NO: 1671; a CDR2 comprising an amino acid sequence of SEQ ID NO: 1672; and a CDR3 comprising an amino acid sequence of SEQ ID NO: 1673;
(518) a CDR1 comprising an amino acid sequence of SEQ ID NO: 1674; a CDR2 comprising an amino acid sequence of SEQ ID NO: 1675; and a CDR3 comprising an amino acid sequence of SEQ ID NO: 1676;
(519) a CDR1 comprising an amino acid sequence of SEQ ID NO: 1677; a CDR2 comprising an amino acid sequence of SEQ ID NO: 1678; and a CDR3 comprising an amino acid sequence of SEQ ID NO: 1679;
(520) a CDR1 comprising an amino acid sequence of SEQ ID NO: 1680; a CDR2 comprising an amino acid sequence of SEQ ID NO: 1681; and a CDR3 comprising an amino acid sequence of SEQ ID NO: 1682;
(521) a CDR1 comprising an amino acid sequence of SEQ ID NO: 1683; a CDR2 comprising an amino acid sequence of SEQ ID NO: 1684; and a CDR3 comprising an amino acid sequence of SEQ ID NO: 1685;
(522) a CDR1 comprising an amino acid sequence of SEQ ID NO: 1686; a CDR2 comprising an amino acid sequence of SEQ ID NO: 1687; and a CDR3 comprising an amino acid sequence of SEQ ID NO: 1688;
(523) a CDR1 comprising an amino acid sequence of SEQ ID NO: 1689; a CDR2 comprising an amino acid sequence of SEQ ID NO: 1690; and a CDR3 comprising an amino acid sequence of SEQ ID NO: 1691;
(524) a CDR1 comprising an amino acid sequence of SEQ ID NO: 1692; a CDR2 comprising an amino acid sequence of SEQ ID NO: 1693; and a CDR3 comprising an amino acid sequence of SEQ ID NO: 1694;
(525) a CDR1 comprising an amino acid sequence of SEQ ID NO: 1695; a CDR2 comprising an amino acid sequence of SEQ ID NO: 1696; and a CDR3 comprising an amino acid sequence of SEQ ID NO: 1697;
(526) a CDR1 comprising an amino acid sequence of SEQ ID NO: 1698; a CDR2 comprising an amino acid sequence of SEQ ID NO: 1699; and a CDR3 comprising an amino acid sequence of SEQ ID NO: 1700;
(527) a CDR1 comprising an amino acid sequence of SEQ ID NO: 1701; a CDR2 comprising an amino acid sequence of SEQ ID NO: 1702; and a CDR3 comprising an amino acid sequence of SEQ ID NO: 1703;
(528) a CDR1 comprising an amino acid sequence of SEQ ID NO: 1704; a CDR2 comprising an amino acid sequence of SEQ ID NO: 1705; and a CDR3 comprising an amino acid sequence of SEQ ID NO: 1706;
(529) a CDR1 comprising an amino acid sequence of SEQ ID NO: 1707; a CDR2 comprising an amino acid sequence of SEQ ID NO: 1708; and a CDR3 comprising an amino acid sequence of SEQ ID NO: 1709;
(530) a CDR1 comprising an amino acid sequence of SEQ ID NO: 1710; a CDR2 comprising an amino acid sequence of SEQ ID NO: 1711; and a CDR3 comprising an amino acid sequence of SEQ ID NO: 1712;
(531) a CDR1 comprising an amino acid sequence of SEQ ID NO: 1713; a CDR2 comprising an amino acid sequence of SEQ ID NO: 1714; and a CDR3 comprising an amino acid sequence of SEQ ID NO: 1715;
(532) a CDR1 comprising an amino acid sequence of SEQ ID NO: 1716; a CDR2 comprising an amino acid sequence of SEQ ID NO: 1717; and a CDR3 comprising an amino acid sequence of SEQ ID NO: 1718;
(533) a CDR1 comprising an amino acid sequence of SEQ ID NO: 1719; a CDR2 comprising an amino acid sequence of SEQ ID NO: 1720; and a CDR3 comprising an amino acid sequence of SEQ ID NO: 1721;
(534) a CDR1 comprising an amino acid sequence of SEQ ID NO: 1722; a CDR2 comprising an amino acid sequence of SEQ ID NO: 1723; and a CDR3 comprising an amino acid sequence of SEQ ID NO: 1724;
(535) a CDR1 comprising an amino acid sequence of SEQ ID NO: 1725; a CDR2 comprising an amino acid sequence of SEQ ID NO: 1726; and a CDR3 comprising an amino acid sequence of SEQ ID NO: 1727;
(536) a CDR1 comprising an amino acid sequence of SEQ ID NO: 1728; a CDR2 comprising an amino acid sequence of SEQ ID NO: 1729; and a CDR3 comprising an amino acid sequence of SEQ ID NO: 1730;
(537) a CDR1 comprising an amino acid sequence of SEQ ID NO: 1731; a CDR2 comprising an amino acid sequence of SEQ ID NO: 1732; and a CDR3 comprising an amino acid sequence of SEQ ID NO: 1733;
(538) a CDR1 comprising an amino acid sequence of SEQ ID NO: 1734; a CDR2 comprising an amino acid sequence of SEQ ID NO: 1735; and a CDR3 comprising an amino acid sequence of SEQ ID NO: 1736;
(539) a CDR1 comprising an amino acid sequence of SEQ ID NO: 1737; a CDR2 comprising an amino acid sequence of SEQ ID NO: 1738; and a CDR3 comprising an amino acid sequence of SEQ ID NO: 1739;
(540) a CDR1 comprising an amino acid sequence of SEQ ID NO: 1740; a CDR2 comprising an amino acid sequence of SEQ ID NO: 1741; and a CDR3 comprising an amino acid sequence of SEQ ID NO: 1742;
(541) a CDR1 comprising an amino acid sequence of SEQ ID NO: 1743; a CDR2 comprising an amino acid sequence of SEQ ID NO: 1744; and a CDR3 comprising an amino acid sequence of SEQ ID NO: 1745;
(542) a CDR1 comprising an amino acid sequence of SEQ ID NO: 1746; a CDR2 comprising an amino acid sequence of SEQ ID NO: 1747; and a CDR3 comprising an amino acid sequence of SEQ ID NO: 1748;
(543) a CDR1 comprising an amino acid sequence of SEQ ID NO: 1749; a CDR2 comprising an amino acid sequence of SEQ ID NO: 1750; and a CDR3 comprising an amino acid sequence of SEQ ID NO: 1751;
(544) a CDR1 comprising an amino acid sequence of SEQ ID NO: 1752; a CDR2 comprising an amino acid sequence of SEQ ID NO: 1753; and a CDR3 comprising an amino acid sequence of SEQ ID NO: 1754;
(545) a CDR1 comprising an amino acid sequence of SEQ ID NO: 1755; a CDR2 comprising an amino acid sequence of SEQ ID NO: 1756; and a CDR3 comprising an amino acid sequence of SEQ ID NO: 1757;
(546) a CDR1 comprising an amino acid sequence of SEQ ID NO: 1758; a CDR2 comprising an amino acid sequence of SEQ ID NO: 1759; and a CDR3 comprising an amino acid sequence of SEQ ID NO: 1760;
(547) a CDR1 comprising an amino acid sequence of SEQ ID NO: 1761; a CDR2 comprising an amino acid sequence of SEQ ID NO: 1762; and a CDR3 comprising an amino acid sequence of SEQ ID NO: 1763;
(548) a CDR1 comprising an amino acid sequence of SEQ ID NO: 1764; a CDR2 comprising an amino acid sequence of SEQ ID NO: 1765; and a CDR3 comprising an amino acid sequence of SEQ ID NO: 1766;
(549) a CDR1 comprising an amino acid sequence of SEQ ID NO: 1767; a CDR2 comprising an amino acid sequence of SEQ ID NO: 1768; and a CDR3 comprising an amino acid sequence of SEQ ID NO: 1769;
(550) a CDR1 comprising an amino acid sequence of SEQ ID NO: 1770; a CDR2 comprising an amino acid sequence of SEQ ID NO: 1771; and a CDR3 comprising an amino acid sequence of SEQ ID NO: 1772;
(551) a CDR1 comprising an amino acid sequence of SEQ ID NO: 1773; a CDR2 comprising an amino acid sequence of SEQ ID NO: 1774; and a CDR3 comprising an amino acid sequence of SEQ ID NO: 1775;
(552) a CDR1 comprising an amino acid sequence of SEQ ID NO: 1776; a CDR2 comprising an amino acid sequence of SEQ ID NO: 1777; and a CDR3 comprising an amino acid sequence of SEQ ID NO: 1778;
(553) a CDR1 comprising an amino acid sequence of SEQ ID NO: 1779; a CDR2 comprising an amino acid sequence of SEQ ID NO: 1780; and a CDR3 comprising an amino acid sequence of SEQ ID NO: 1781;
(554) a CDR1 comprising an amino acid sequence of SEQ ID NO: 1782; a CDR2 comprising an amino acid sequence of SEQ ID NO: 1783; and a CDR3 comprising an amino acid sequence of SEQ ID NO: 1784;
(555) a CDR1 comprising an amino acid sequence of SEQ ID NO: 1785; a CDR2 comprising an amino acid sequence of SEQ ID NO: 1786; and a CDR3 comprising an amino acid sequence of SEQ ID NO: 1787;
(556) a CDR1 comprising an amino acid sequence of SEQ ID NO: 1788; a CDR2 comprising an amino acid sequence of SEQ ID NO: 1789; and a CDR3 comprising an amino acid sequence of SEQ ID NO: 1790;
(557) a CDR1 comprising an amino acid sequence of SEQ ID NO: 1791; a CDR2 comprising an amino acid sequence of SEQ ID NO: 1792; and a CDR3 comprising an amino acid sequence of SEQ ID NO: 1793;
(558) a CDR1 comprising an amino acid sequence of SEQ ID NO: 1794; a CDR2 comprising an amino acid sequence of SEQ ID NO: 1795; and a CDR3 comprising an amino acid sequence of SEQ ID NO: 1796;
(559) a CDR1 comprising an amino acid sequence of SEQ ID NO: 1797; a CDR2 comprising an amino acid sequence of SEQ ID NO: 1798; and a CDR3 comprising an amino acid sequence of SEQ ID NO: 1799;
(560) a CDR1 comprising an amino acid sequence of SEQ ID NO: 1800; a CDR2 comprising an amino acid sequence of SEQ ID NO: 1801; and a CDR3 comprising an amino acid sequence of SEQ ID NO: 1802;
(561) a CDR1 comprising an amino acid sequence of SEQ ID NO: 1803; a CDR2 comprising an amino acid sequence of SEQ ID NO: 1804; and a CDR3 comprising an amino acid sequence of SEQ ID NO: 1805;
(562) a CDR1 comprising an amino acid sequence of SEQ ID NO: 1806; a CDR2 comprising an amino acid sequence of SEQ ID NO: 1807; and a CDR3 comprising an amino acid sequence of SEQ ID NO: 1808;
(563) a CDR1 comprising an amino acid sequence of SEQ ID NO: 1809; a CDR2 comprising an amino acid sequence of SEQ ID NO: 1810; and a CDR3 comprising an amino acid sequence of SEQ ID NO: 1811;
(564) a CDR1 comprising an amino acid sequence of SEQ ID NO: 1812; a CDR2 comprising an amino acid sequence of SEQ ID NO: 1813; and a CDR3 comprising an amino acid sequence of SEQ ID NO: 1814;
(565) a CDR1 comprising an amino acid sequence of SEQ ID NO: 1815; a CDR2 comprising an amino acid sequence of SEQ ID NO: 1816; and a CDR3 comprising an amino acid sequence of SEQ ID NO: 1817;
(566) a CDR1 comprising an amino acid sequence of SEQ ID NO: 1818; a CDR2 comprising an amino acid sequence of SEQ ID NO: 1819; and a CDR3 comprising an amino acid sequence of SEQ ID NO: 1820;
(567) a CDR1 comprising an amino acid sequence of SEQ ID NO: 1821; a CDR2 comprising an amino acid sequence of SEQ ID NO: 1822; and a CDR3 comprising an amino acid sequence of SEQ ID NO: 1823;
(568) a CDR1 comprising an amino acid sequence of SEQ ID NO: 1824; a CDR2 comprising an amino acid sequence of SEQ ID NO: 1825; and a CDR3 comprising an amino acid sequence of SEQ ID NO: 1826;
(569) a CDR1 comprising an amino acid sequence of SEQ ID NO: 1827; a CDR2 comprising an amino acid sequence of SEQ ID NO: 1828; and a CDR3 comprising an amino acid sequence of SEQ ID NO: 1829;
(570) a CDR1 comprising an amino acid sequence of SEQ ID NO: 1830; a CDR2 comprising an amino acid sequence of SEQ ID NO: 1831; and a CDR3 comprising an amino acid sequence of SEQ ID NO: 1832;
(571) a CDR1 comprising an amino acid sequence of SEQ ID NO: 1833; a CDR2 comprising an amino acid sequence of SEQ ID NO: 1834; and a CDR3 comprising an amino acid sequence of SEQ ID NO: 1835;
(572) a CDR1 comprising an amino acid sequence of SEQ ID NO: 1836; a CDR2 comprising an amino acid sequence of SEQ ID NO: 1837; and a CDR3 comprising an amino acid sequence of SEQ ID NO: 1838;
(573) a CDR1 comprising an amino acid sequence of SEQ ID NO: 1839; a CDR2 comprising an amino acid sequence of SEQ ID NO: 1840; and a CDR3 comprising an amino acid sequence of SEQ ID NO: 1841;
(574) a CDR1 comprising an amino acid sequence of SEQ ID NO: 1842; a CDR2 comprising an amino acid sequence of SEQ ID NO: 1843; and a CDR3 comprising an amino acid sequence of SEQ ID NO: 1844;
(575) a CDR1 comprising an amino acid sequence of SEQ ID NO: 1845; a CDR2 comprising an amino acid sequence of SEQ ID NO: 1846; and a CDR3 comprising an amino acid sequence of SEQ ID NO: 1847;
(576) a CDR1 comprising an amino acid sequence of SEQ ID NO: 1848; a CDR2 comprising an amino acid sequence of SEQ ID NO: 1849; and a CDR3 comprising an amino acid sequence of SEQ ID NO: 1850;
(577) a CDR1 comprising an amino acid sequence of SEQ ID NO: 1851; a CDR2 comprising an amino acid sequence of SEQ ID NO: 1852; and a CDR3 comprising an amino acid sequence of SEQ ID NO: 1853;
(578) a CDR1 comprising an amino acid sequence of SEQ ID NO: 1854; a CDR2 comprising an amino acid sequence of SEQ ID NO: 1855; and a CDR3 comprising an amino acid sequence of SEQ ID NO: 1856;
(579) a CDR1 comprising an amino acid sequence of SEQ ID NO: 1857; a CDR2 comprising an amino acid sequence of SEQ ID NO: 1858; and a CDR3 comprising an amino acid sequence of SEQ ID NO: 1859;
(580) a CDR1 comprising an amino acid sequence of SEQ ID NO: 1860; a CDR2 comprising an amino acid sequence of SEQ ID NO: 1861; and a CDR3 comprising an amino acid sequence of SEQ ID NO: 1862;
(581) a CDR1 comprising an amino acid sequence of SEQ ID NO: 1863; a CDR2 comprising an amino acid sequence of SEQ ID NO: 1864; and a CDR3 comprising an amino acid sequence of SEQ ID NO: 1865;
(582) a CDR1 comprising an amino acid sequence of SEQ ID NO: 1866; a CDR2 comprising an amino acid sequence of SEQ ID NO: 1867; and a CDR3 comprising an amino acid sequence of SEQ ID NO: 1868;
(583) a CDR1 comprising an amino acid sequence of SEQ ID NO: 1869; a CDR2 comprising an amino acid sequence of SEQ ID NO: 1870; and a CDR3 comprising an amino acid sequence of SEQ ID NO: 1871;
(584) a CDR1 comprising an amino acid sequence of SEQ ID NO: 1872; a CDR2 comprising an amino acid sequence of SEQ ID NO: 1873; and a CDR3 comprising an amino acid sequence of SEQ ID NO: 1874;
(585) a CDR1 comprising an amino acid sequence of SEQ ID NO: 1875; a CDR2 comprising an amino acid sequence of SEQ ID NO: 1876; and a CDR3 comprising an amino acid sequence of SEQ ID NO: 1877;
(586) a CDR1 comprising an amino acid sequence of SEQ ID NO: 1878; a CDR2 comprising an amino acid sequence of SEQ ID NO: 1879; and a CDR3 comprising an amino acid sequence of SEQ ID NO: 1880;
(587) a CDR1 comprising an amino acid sequence of SEQ ID NO: 1881; a CDR2 comprising an amino acid sequence of SEQ ID NO: 1882; and a CDR3 comprising an amino acid sequence of SEQ ID NO: 1883;
(588) a CDR1 comprising an amino acid sequence of SEQ ID NO: 1884; a CDR2 comprising an amino acid sequence of SEQ ID NO: 1885; and a CDR3 comprising an amino acid sequence of SEQ ID NO: 1886;
(589) a CDR1 comprising an amino acid sequence of SEQ ID NO: 1887; a CDR2 comprising an amino acid sequence of SEQ ID NO: 1888; and a CDR3 comprising an amino acid sequence of SEQ ID NO: 1889;
(590) a CDR1 comprising an amino acid sequence of SEQ ID NO: 1890; a CDR2 comprising an amino acid sequence of SEQ ID NO: 1891; and a CDR3 comprising an amino acid sequence of SEQ ID NO: 1892;
(591) a CDR1 comprising an amino acid sequence of SEQ ID NO: 1893; a CDR2 comprising an amino acid sequence of SEQ ID NO: 1894; and a CDR3 comprising an amino acid sequence of SEQ ID NO: 1895;
(592) a CDR1 comprising an amino acid sequence of SEQ ID NO: 1896; a CDR2 comprising an amino acid sequence of SEQ ID NO: 1897; and a CDR3 comprising an amino acid sequence of SEQ ID NO: 1898;
(593) a CDR1 comprising an amino acid sequence of SEQ ID NO: 1899; a CDR2 comprising an amino acid sequence of SEQ ID NO: 1900; and a CDR3 comprising an amino acid sequence of SEQ ID NO: 1901;
(594) a CDR1 comprising an amino acid sequence of SEQ ID NO: 1902; a CDR2 comprising an amino acid sequence of SEQ ID NO: 1903; and a CDR3 comprising an amino acid sequence of SEQ ID NO: 1904;
(595) a CDR1 comprising an amino acid sequence of SEQ ID NO: 1905; a CDR2 comprising an amino acid sequence of SEQ ID NO: 1906; and a CDR3 comprising an amino acid sequence of SEQ ID NO: 1907;
(596) a CDR1 comprising an amino acid sequence of SEQ ID NO: 1908; a CDR2 comprising an amino acid sequence of SEQ ID NO: 1909; and a CDR3 comprising an amino acid sequence of SEQ ID NO: 1910;
(597) a CDR1 comprising an amino acid sequence of SEQ ID NO: 1911; a CDR2 comprising an amino acid sequence of SEQ ID NO: 1912; and a CDR3 comprising an amino acid sequence of SEQ ID NO: 1913;
(598) a CDR1 comprising an amino acid sequence of SEQ ID NO: 1914; a CDR2 comprising an amino acid sequence of SEQ ID NO: 1915; and a CDR3 comprising an amino acid sequence of SEQ ID NO: 1916;
(599) a CDR1 comprising an amino acid sequence of SEQ ID NO: 1917; a CDR2 comprising an amino acid sequence of SEQ ID NO: 1918; and a CDR3 comprising an amino acid sequence of SEQ ID NO: 1919;
(600) a CDR1 comprising an amino acid sequence of SEQ ID NO: 1920; a CDR2 comprising an amino acid sequence of SEQ ID NO: 1921; and a CDR3 comprising an amino acid sequence of SEQ ID NO: 1922;
(601) a CDR1 comprising an amino acid sequence of SEQ ID NO: 1923; a CDR2 comprising an amino acid sequence of SEQ ID NO: 1924; and a CDR3 comprising an amino acid sequence of SEQ ID NO: 1925;
(602) a CDR1 comprising an amino acid sequence of SEQ ID NO: 1926; a CDR2 comprising an amino acid sequence of SEQ ID NO: 1927; and a CDR3 comprising an amino acid sequence of SEQ ID NO: 1928;
(603) a CDR1 comprising an amino acid sequence of SEQ ID NO: 1929; a CDR2 comprising an amino acid sequence of SEQ ID NO: 1930; and a CDR3 comprising an amino acid sequence of SEQ ID NO: 1931;
(604) a CDR1 comprising an amino acid sequence of SEQ ID NO: 1932; a CDR2 comprising an amino acid sequence of SEQ ID NO: 1933; and a CDR3 comprising an amino acid sequence of SEQ ID NO: 1934;
(605) a CDR1 comprising an amino acid sequence of SEQ ID NO: 1935; a CDR2 comprising an amino acid sequence of SEQ ID NO: 1936; and a CDR3 comprising an amino acid sequence of SEQ ID NO: 1937;
(606) a CDR1 comprising an amino acid sequence of SEQ ID NO: 1938; a CDR2 comprising an amino acid sequence of SEQ ID NO: 1939; and a CDR3 comprising an amino acid sequence of SEQ ID NO: 1940;
(607) a CDR1 comprising an amino acid sequence of SEQ ID NO: 1941; a CDR2 comprising an amino acid sequence of SEQ ID NO: 1942; and a CDR3 comprising an amino acid sequence of SEQ ID NO: 1943;
(608) a CDR1 comprising an amino acid sequence of SEQ ID NO: 1944; a CDR2 comprising an amino acid sequence of SEQ ID NO: 1945; and a CDR3 comprising an amino acid sequence of SEQ ID NO: 1946;
(609) a CDR1 comprising an amino acid sequence of SEQ ID NO: 1947; a CDR2 comprising an amino acid sequence of SEQ ID NO: 1948; and a CDR3 comprising an amino acid sequence of SEQ ID NO: 1949;
(610) a CDR1 comprising an amino acid sequence of SEQ ID NO: 1950; a CDR2 comprising an amino acid sequence of SEQ ID NO: 1951; and a CDR3 comprising an amino acid sequence of SEQ ID NO: 1952; and/or
(G) the single domain antibody
(1) comprises a framework derived from the framework of any of the single domain antibodies comprising the sequences of SEQ ID NOs: 1 to 122;
(2) comprises a framework comprising sequence having at least 75%, 80%, 85%, 90%, 95%, 96%, 97%, 98%, 99%, or 100% sequence identity with any of the sequences of SEQ ID NOs: 1 to 122; or
(3) is comprised of a sequence having at least 75%, 80%, 85%, 90%, 95%, 96%, 97%, 98%, 99%, or 100% sequence identity with any of the sequence of SEQ ID NOs: 1 to 122.

2.-25. (canceled)

26. An isolated nucleic acid molecule encoding the single domain antibody of claim 1.

27. An isolated nucleic acid molecule encoding the single domain antibody having a sequence with at least 85%, 90%, 95%, 96%, 97%, 98%, 99% or 100% sequence identity to any of the sequences of SEQ ID NOs: 1 to 122.

28. A vector comprising the nucleic acid molecule of claim 26.

29. A cell expressing the nucleic acid molecule of claim 26.

30. A pharmaceutical composition comprising
(A) the single domain antibody of claim 1 and a pharmaceutically acceptable excipient; or
(B) (1) a means for delivering a molecule to a mucosal lumen of a subject, and a pharmaceutically acceptable carrier;
(2) a means for delivering a molecule into systemic circulation in a subject, and a pharmaceutically acceptable carrier;
(3) a means for delivering a molecule into lamina propria of a subject, and a pharmaceutically acceptable carrier;
(4) a means for delivering a molecule to an organ of a subject, and a pharmaceutically acceptable carrier; or
(5) a means for delivering a molecule to a pIgR expressing cell, and a pharmaceutically acceptable carrier;
wherein optionally the molecule is an antibody or fragment thereof, a peptide, a vaccine, a small molecule, a polynucleotide, a molecule comprising a radioactive isotope, a toxin, an enzyme, an anticoagulant, a hormone, a cytokine, an anti-inflammatory molecule, an RNAi, an mRNA, a self-replicating RNA, an antibiotic, or an antibody-antibiotic conjugate.

31.-36. (canceled)

37. A therapeutic molecule comprising an agent and the single domain antibody of claim 1; optionally wherein
(A) the agent is an antibody or fragment thereof, a peptide, a vaccine, a small molecule, a polynucleotide, a radioisotope, a toxin, an enzyme, an anticoagulant, a hormone, a cytokine, an anti-inflammatory molecule, an RNAi, an antibiotic, or an antibody-antibiotic conjugate;
optionally wherein the agent is an antibiotic, an antibody or fragment thereof, a peptide or a vaccine; or
(B) the single domain antibody is
(1) genetically fused or chemically conjugated to the agent;
(2) chemically-conjugated to the agent; or
(3) non-covalently bound to the agent;
wherein optionally the therapeutic molecule further comprises a linker between the single domain antibody and the agent;
optionally wherein the linker is a polypeptide or a flexible linker comprising a sequence selected from the group consisting of EPKTPKPQPQPQLQPQPNPTTESKSPK (SEQ ID NO: 1978), (EAAAK)n (SEQ ID NO: 1967), (GGGGS)n (SEQ ID NO: 1968) and (GGGS)n (SEQ ID NO: 1969), wherein n is an integer from 1 to 20.

38.-45. (canceled)

46. A pharmaceutical composition comprising the therapeutic molecule of claim 37 and a pharmaceutically acceptable carrier.

47. A method of delivering a therapeutic molecule to a mucosal lumen of a subject, the method comprising administering to the subject the therapeutic molecule of claim 37; optionally wherein
(A) the therapeutic molecule is delivered to the mucosal lumen via forward transcytosis from the basolateral surface of a mucosal epithelial cell to the apical surface of the mucosal epithelial cell; optionally wherein the cell is in a subject; wherein optionally (1) the mucosal epithelial cell is at or adjacent to the mucosal lumen; (2) the mucosal lumen is in the lung or in the gastrointestinal tract of the subject; or (3) the mucosal epithelial cell is a cancer cell; wherein optionally the cancer cell is a lung cancer cell, an esophageal cancer cell, a stomach cancer cell, a duodenal cancer cell, a liver cancer cell, a bladder cancer cell, a sinus cancer cell, a nasal cavity cancer cell, an endometrial cancer cell or a colorectal cancer cell; or
(B) the therapeutic molecule is administered to the bloodstream of the subject or is administered intravenously or subcutaneously.

48.-53. (canceled)

54. A method of
(A) delivering a therapeutic molecule to an organ of a subject, the method comprising administering to the subject the therapeutic molecule of claim 37; optionally wherein the organ is selected from the group consisting of gastrointestinal track, small intestine, large intestine, stomach, esophagus, salivary gland, lung, vagina, uterus, and lacrimal gland; optionally wherein the organ is lung;
(B) delivering a therapeutic molecule into systemic circulation in a subject, the method comprising administering to the subject the therapeutic molecule of claim 37; optionally wherein
(1) the therapeutic molecule is delivered into the systemic circulation via reverse transcytosis from the apical surface of an epithelial cell to the basolateral surface of the epithelial cell or is delivered by oral delivery, buccal delivery, nasal delivery or inhalation delivery; or
(2) the agent is a peptide, an antibody or fragment thereof or a vaccine;
(C) delivering a therapeutic molecule into lamina propria of a subject, the method comprising administering to the subject the therapeutic molecule of claim 37; optionally wherein
(1) the therapeutic molecule is delivered into the lamina propria via reverse transcytosis from the apical surface of an epithelial cell to the basolateral surface of the epithelial cell; or
(2) the therapeutic molecule is delivered by oral delivery or buccal delivery;
(D) increasing the rate of pIgR-mediated transcytosis across an epithelial cell comprising contacting the cell with the therapeutic molecule of claim 37; optionally wherein (1) the method does not inhibit pIgR-mediated transcytosis of IgA; or (2) the transcytosis is forward transcytosis or reverse transcytosis;
(E) modulating a function of pIgR in a cell comprising contacting the cell with the therapeutic molecule of claim 37; optionally wherein the modulating the function of pIgR in the cell is activating said function of pIgR in said cell or inhibiting said function of pIgR in said cell; or
(F) delivery to a pIgR-expressing cell comprising contacting the cell with the therapeutic molecule of claim 37; optionally wherein the method of delivery is oral delivery, buccal delivery, nasal delivery or inhalation delivery.

55.-74. (canceled)

75. A method to diagnose a disease or condition comprising:
administering to the subject the therapeutic molecule of claim 37, to the subject;
detecting the amount of single domain antibody in a tissue of the subject, wherein the tissue comprises a diseased cell; and
comparing the amount of single domain antibody in the tissue of the subject with a reference amount of single domain antibody in the tissue of a comparable healthy subject;
optionally wherein
(A) the tissue comprises a mucosal cell or a mucosal lumen;
(B) the single domain antibody comprises a radioisotope; optionally wherein the radioisotope is zirconium-89; or
(C) the diseased cell expresses an antigen, and wherein the therapeutic molecule is coupled to an antibody that specifically recognizes the antigen; optionally wherein the antigen is specific to the diseased cell.

76.-79. (canceled)

80. The method of claim 75, wherein
(1) the disease is lung cancer, and wherein the tissue is lung;
(2) the disease is endometrial cancer, and wherein the tissue is the uterus;
(3) the disease is colon cancer, and wherein the tissue is the colon; or
(4) the disease is an inflammatory disease, and wherein the tissue is lamina propria;
optionally wherein the inflammatory disease is inflammatory bowel disease, Crohn's disease, or ulcerative colitis.

81.-87. (canceled)

88. A method for
(A) delivering a single domain antibody or a therapeutic molecule from an apical surface of a polymeric immunoglobulin receptor (pIgR)-expressing cell to a basolateral surface of the pIgR-expressing cell comprising contacting the pIgR-expressing cell with the single domain antibody or the therapeutic molecule, wherein the single domain antibody binds to pIgR and the therapeutic molecule comprises an agent and the single domain antibody;
(B) transporting a therapeutic molecule to a
(1) basolateral surface of the pIgR-expressing cell of a subject, comprising administering to the subject the therapeutic molecule comprising an agent and a single domain antibody that binds to pIgR; optionally, wherein the therapeutic molecule is administered to the subject via oral delivery, buccal delivery, nasal delivery or inhalation delivery; or
(2) systemic circulation of a subject, comprising administering to the subject a therapeutic molecule comprising an agent and a single domain antibody that binds to pIgR, wherein the therapeutic molecule is administered to the subject via oral delivery, buccal delivery, nasal delivery or inhalation delivery;
or
(C) transporting a therapeutic molecule to lamina propria or gastrointestinal tract of a subject, comprising administering to the subject a therapeutic molecule comprising an agent and a single domain antibody that binds to pIgR, wherein the therapeutic molecule is administered to the subject via oral delivery, buccal delivery, nasal delivery or inhalation delivery;
optionally wherein
(a) the therapeutic agent is transported from an apical surface of a pIgR-expressing cell to a basolateral surface of the pIgR-expressing cell in the subject;
(b) the single domain antibody or the therapeutic molecule comprising the agent and the single domain antibody is capable of being transported from the basolateral surface of the pIgR-expressing cell to the apical surface of the pIgR-expressing cell;
(c) the pIgR-expressing cell is an epithelial cell; optionally wherein the epithelial cell is an intestinal lumen cell or an airway epithelial cell;
(d) the agent is a:
(1) diabetes medication, wherein the diabetes medication is selected from a group consisting of insulin, glucagon-like-peptide-1, insulin-mimic peptides, and glucagon-like-peptide-1-mimic peptides;
(2) peptide or an antibody or a fragment thereof; optionally wherein the antibody or fragment thereof is selected from a group consisting of an anti-TNF-alpha antibody or a fragment thereof, an anti-IL23 antibody or a fragment thereof, an antibody or a fragment thereof that binds to a receptor of IL23, or an inhibitor of the receptor of IL23; or
(3) vaccine, wherein the vaccine is for preventing an infection selected from a group consisting of Vibrio, Cholera, Typhoid, Rotavirus, Tuberculosis, HIV, Flu, Ebola, and Sendai;
(e) the single domain antibody is the single domain antibody of claim 1; or
(f) the method does not inhibit pIgR-mediated transcytosis of IgA.

89.-104. (canceled)

105. A process for providing a molecule to a subject, comprising administering to the subject the molecule comprising an agent and a single domain antibody that binds to polymeric immunoglobulin receptor (pIgR), wherein the molecule is administered to the subject via oral delivery, buccal delivery, nasal delivery or inhalation delivery; optionally wherein the process does not inhibit pIgR-mediated transcytosis of IgA;
optionally wherein
(A) the molecule is capable of being provided to a basolateral surface of an pIgR-expressing cell from an apical surface of the pIgR-expressing cell in the subject; or wherein the molecule is capable of being provided to an apical surface of the pIgR-expressing cell from a basolateral surface of an pIgR-expressing cell in the subject;
(B) the pIgR-expressing cell is an epithelial cell; optionally wherein the epithelial cell is an intestinal lumen cell or an airway epithelial cell;
(C) the agent is a
(1) diabetes medication, wherein the diabetes medication is selected from a group consisting of insulin, glucagon-like-peptide-1, insulin-mimic peptides, and glucagon-like-peptide-1-mimic peptides;
(2) peptide or an antibody or a fragment thereof, wherein the antibody or fragment thereof is selected from a group consisting of an anti-TNF-alpha antibody or a fragment thereof, an anti-IL23 antibody or a fragment thereof, and an antibody that binds to a receptor of IL23 or a fragment thereof; or
(3) vaccine, wherein the vaccine is for preventing an infection selected from a group consisting of Vibrio, Cholera, Typhoid, Rotavirus, Tuberculosis, HIV, Flu, Ebola, and Sendai; or
(D) the single domain antibody is
(1) the single domain antibody of claim 1; or
(2) genetically fused or chemically conjugated to the agent.

106.-117. (canceled)

118. The process of claim 105,
(A) further comprising a linker between the single domain antibody and the agent;
optionally wherein the linker is a polypeptide;
optionally wherein the linker is a flexible linker comprising a sequence selected from the group consisting of EPKTPKPQPQPQLQPQPNPTTESKSPK (SEQ ID NO: 1978), (EAAAK)n (SEQ ID NO: 1967), (GGGGS)n (SEQ ID NO: 1968) and (GGGS)n (SEQ ID NO: 1969), wherein n is an integer from 1 to 20; or
(B) the single domain antibody is chemically-conjugated to the agent or wherein the single domain antibody is non-covalently bound to the agent.

119.-123. (canceled)

124. A process comprising steps for providing a molecule to a subject;
optionally wherein
(A) the molecule comprises an agent and a single domain antibody that binds to pIgR.
(B) the agent is an antibody or fragment thereof, a peptide, a vaccine, a small molecule, a polynucleotide, a radioisotope, a toxin, an enzyme, an anticoagulant, a hormone, a cytokine, an anti-inflammatory molecule, an RNAi, an antibiotic, or an antibody-antibiotic conjugate; or
(C) the single domain antibody is genetically fused or chemically conjugated to the agent.

125.-128. (canceled)

129. A system for providing a molecule to lamina propria of a subject, comprising a molecule suitable for administering to the subject, the molecule comprising an agent and a single domain antibody that binds to pIgR, wherein the molecule is administered to the subject via oral delivery, buccal delivery, nasal delivery or inhalation delivery, or a combination thereof; optionally wherein the system does not inhibit pIgR-mediated transcytosis of IgA.

130. The system of claim 129, wherein the agent is a
(1) diabetes medication, wherein the diabetes medication is selected from a group consisting of insulin, glucagon-like-peptide-1, insulin-mimic peptides, and glucagon-like-peptide-1-mimic peptides;
(2) peptide or an antibody or a fragment thereof, wherein the antibody or fragment thereof is selected from a group consisting of an anti-TNF-alpha antibody or a fragment thereof, an anti-IL23 antibody or a fragment thereof, and an antibody that binds to a receptor of IL23 or a fragment thereof; or
(3) vaccine, wherein the vaccine is for preventing an infection selected from a group consisting of Vibrio, Cholera, Typhoid, Rotavirus, Tuberculosis, HIV, Flu, Ebola, and Sendai.

131.-135. (canceled)

136. A system for providing a molecule to lamina propria of a subject, wherein the single domain antibody is the single domain antibody of claim 1.

137. (canceled)

138. A system comprising a means for providing a molecule to lamina propria of a subject; optionally wherein
(A) the molecule comprises an agent and a single domain antibody that binds to pIgR;
(B) the agent is an antibody or fragment thereof, a peptide, a vaccine, a small molecule, a polynucleotide, a radioisotope, a toxin, an enzyme, an anticoagulant, a hormone, a cytokine, an anti-inflammatory molecule, an RNAi, an antibiotic, or an antibody-antibiotic conjugate; or
(C) the single domain antibody is genetically fused or chemically conjugated to the agent.

139.-142. (canceled)

The application's sequence listing, which the Patent Office published only in electronic form, follows.

SEQUENCE LISTING (1982 sequences)

SEQ ID NO: 1 - protein, 126 aa, Artificial Sequence
  Description of Artificial Sequence: Synthetic polypeptide
EVQLVESGGGLVQAGDSLRLSCAASGRTFTTYGVGWFRQAPGKEREFVTTITWSGSTNYKYYADSVKGRFTISRDNAKNTVYLQMNSLKPDDTAVYYCAASTVLTDPRVPTEYDYWGQGTQVTVSS

SEQ ID NO: 2 - protein, 128 aa, Artificial Sequence
  Description of Artificial Sequence: Synthetic polypeptide
EVQLVESGGGLVQPGGSLRLSCAASGRTFSSLTMAWFRRAPGKEREFVAAQKWAGATTYTYYGDSVKGRFTISRDNAKDTVYLQMNSLKPVDTAIYYCAADTSSIVGDPRSPNRYDYWGQGTQVTVSS

SEQ ID NO: 3 - protein, 124 aa, Artificial Sequence
  Description of Artificial Sequence: Synthetic polypeptide
EVQLVESGGGLVQAGGSLRLSCAASGRTINTYVMGWFRQAPGKEREFVARIDWSGSSTDYADSVKGRFTISRDNAKNTVYLQMNSLKPEDTAVYYCAGSAYYSGYVTHRDFGSWGQGTQVTVSS

SEQ ID NO: 4 - protein, 125 aa, Artificial Sequence
  Description of Artificial Sequence: Synthetic polypeptide
EVQLVESGGGLVQAGGSLRLSCAASGRSLSFDTYAMGWFRQAPGKEREFVASIDWNGGSTYYADSVKGRFTISRDNARNTVNLRMNSLKPDDTAVYYCAAARYYTSGTYFPANYWGQGTQVTVSS

SEQ ID NO: 5 - protein, 128 aa, Artificial Sequence
  Description of Artificial Sequence: Synthetic polypeptide
QVQLVESGGGSVQTGGSLRLSCTASGRTFSNYGMGWFRQAPGKEREFVAGITRSGRTTYYYYADAVKGRFTIPRDNADNTIYLQMDSMKPDDTAVYYCAARQGENNYDPRSGSAYNYWGPGTQVTVSS

SEQ ID NO: 6 - protein, 125 aa, Artificial Sequence
  Description of Artificial Sequence: Synthetic polypeptide
QVQLVESGGGLVQAGDSLRLSCAASGRALSFNTYAMAWFRQAPGKEREFVASITYNGGSTYYADSVRGRFTVTRDSGKNTVTLRMNSLKPDDTAVYYCASAQYWRSGTSFPANYWGQGTLVTVSS

SEQ ID NO: 7 - protein, 123 aa, Artificial Sequence
  Description of Artificial Sequence: Synthetic polypeptide
EVQLVESGGGLVQAGGSLRLSCAASGMPDNIFSIKTMGWYRQAPGKERELVAAITSGGSTNYGDSVKDRFTISRDRIENTVNLEMNNLKPEDTAVYTCHADLTYIRFQDMEYWGKGTQVTVSS

SEQ ID NO: 8 - protein, 124 aa, Artificial Sequence
  Description of Artificial Sequence: Synthetic polypeptide
QVQLVESGGGLVQTGGSLRLSCAASGLTFSSYTMGWFRQAPGKEREFVAAISWGGASTWYADSVKGRFTISRDNAKTMVYLQMNGLKPEDTAVYYCAKGRNNGYATAVRAYDYWGQGTLVTVSS

SEQ ID NO: 9 - protein, 128 aa, Artificial Sequence
  Description of Artificial Sequence: Synthetic polypeptide
EVQLVESGGGLVQAGGSLRLSCAASGRTLSVDRMGWFRQVPGKEREFIAARTWSGSSTYIYYADSVKGRFAISRDRAKNTIDLQMNSLKLEDTGAYYCAADVRGGSYDVRRDEGYAYWGQGTLVTVSS

SEQ ID NO: 10 - protein, 122 aa, Artificial Sequence
  Description of Artificial Sequence: Synthetic polypeptide
QVQLVESGGGLVQSGGSLRLSCAASGRTFSDYAMGWFRQAPGKERELVAAITWNGGSTYYADSVKGRFTISRDNAKNTVDLQMNSLKPEDTAVYYCAADPLNSDSAGTYDYWGQGTLVTVSS

SEQ ID NO: 11 - protein, 124 aa, Artificial Sequence
  Description of Artificial Sequence: Synthetic polypeptide
QVQLVESGGGLVQAGGSLRLSCAASGRTIYGYVMGWFRQAPGKEREFVARIDWSGSSTDYADSVKGRFTISRDNAKNTVYLQMNSLKPEDTAVYYCAGSAYYSGYVTHRDFGSWGQGTQVTVSS

SEQ ID NO: 12 - protein, 123 aa, Artificial Sequence
  Description of Artificial Sequence: Synthetic polypeptide
QVQLVESGGGLVQAGGSLRLSCAASGRTLRSYIVGWFRQAPGKEREFVAAVTWSDGRRVTADPVKGRFTISRDNAKNTVYLQMDSLKPEDAAVYYCAVSRGGAYEYSRAYEYWGQGTLVTVSS

SEQ ID NO: 13 - protein, 130 aa, Artificial Sequence
  Description of Artificial Sequence: Synthetic polypeptide
EVQLVESGGGLVQTGGSLRLSCAASGRTFSPYAMGWFRQAPGKEREFVAAIRWSGATTYKYVGGSVQGRFTISRDAAGNTVYLQMNSVKPEDTAVYYCAADRVPKDISIDPRNPKDWDYWGKGTQVTVSS

SEQ ID NO: 14 - protein, 126 aa, Artificial Sequence
  Description of Artificial Sequence: Synthetic polypeptide
EVQLVESGGGLVQAGGSLRLSCAASGRSYAMGWFRQAPGKEREFAAAISWSGSRTYYADAVKGRFTISRDNAKNTVYLQMNSLKPEDTAVYYCAADPDGTVVASSGWTNSYEYGYWGQGTLVTVSS

SEQ ID NO: 15 - protein, 127 aa, Artificial Sequence
  Description of Artificial Sequence: Synthetic polypeptide
EVQLVESGGGVVQAEDSLRLSCAASGLSFSLSRMGWFRQAPGKEREFVATIEWSGRSTYKYYDDSVKGRFAVSGDNTKNTMNLQMKGLNLEDTGVYYCAANPNNYGDPRTPGAYQYWGQGTQVTVSS

SEQ ID NO: 16 - protein, 124 aa, Artificial Sequence
  Description of Artificial Sequence: Synthetic polypeptide
EVQLVESGGGLVQAGGSLRLSCAASGRTLNTYVMGWFRQAPGKEREFVARIDWSGSTTDYADSVKGRFTISRDNAKNTVYLQMNSLKPEDTAVYYCAGSAYYSGYVTHRDFGSWGQGTQVTVSS

SEQ ID NO: 17 - protein, 125 aa, Artificial Sequence
  Description of Artificial Sequence: Synthetic polypeptide
EVQLVESGGGLLQAGGSLRLSCAASGRTYAMAWFSQAPGKEREFVAGIRGGGGYTYSADSVKGRFTISRDNAKNTVHLQMNMLKPEDTAVYYCAAGDSSLTLGTRAYTAEAYEHWGQGTLVTVSS

SEQ ID NO: 18 - protein, 127 aa, Artificial Sequence
  Description of Artificial Sequence: Synthetic polypeptide
EVQLVESGGGLVQAGGSLRLSCAASGRTFSSNPMGWFRQAPGKEREFVAAISWSGGGTYYADSVKGRFTISRDNAKNTVTLQMNSLKPEDTAVYYCASRDYSDPISLWVEGREYDYWGQGTLVTVSS

SEQ ID NO: 19 - protein, 126 aa, Artificial Sequence
  Description of Artificial Sequence: Synthetic polypeptide
EVQLVESGGGLVQAGDSLRLSCAASGRTLTTYGMGWFRQAPGKEREFVATIKWSGSTNYKYYADSVKGRFTISRDNAKNTVYLQMNSLKPEDTAVYYCAAGTVLGDPRVLNEYDYWGQGTLVTVSS

SEQ ID NO: 20 - protein, 129 aa, Artificial Sequence
  Description of Artificial Sequence: Synthetic polypeptide
EVQLVESGGGLVQTGGSLRLSCAASGRTFSSYAMGWFRQAPGKEPERDFVAALRWSNDRTYYKYYADSVKGRFTISRDNAKNTVYLQMNTLKPEDTAVYYCAGGNYFSDPRVDKEYNYWGQGTQVTVSS

SEQ ID NO: 21 - protein, 127 aa, Artificial Sequence
  Description of Artificial Sequence: Synthetic polypeptide
QVQLVESGGGLVQAGGSLRLSCAASGRTVSSVAMGWFRQAPGKEREFVATISWTGGSTYYADSVKGRFTISRDNAKNTAYLQMNSLKPEDTAVYYCAAGYPADPIALMTLRYEYDYWGQGTLVTVSS

SEQ ID NO: 22 - protein, 131 aa, Artificial Sequence
  Description of Artificial Sequence: Synthetic polypeptide
EVQLVESGGGLVQAGGSLRLSCAASGRTSSIYNMGWFRQAPGQEREFVAAIHWGGGRTYYADSVKGRFTISRDNAKNTVYLQMNSLEPGDTANYYCAARRAPELLDDYKQKPEEIGTYHYWGQGTQVTVSS

SEQ ID NO: 23 - protein, 129 aa, Artificial Sequence
  Description of Artificial Sequence: Synthetic polypeptide
EVQLVESGGGLVQAGGSLRLSCAASGRTFSSGIMGWFRQAPGKEREFVAAIEWSGGNTYKYYAESVKGRFAISRDNAKTTAYLQMGSLNPEDTALYYCAADESPSRYIDLRRPAPYHYWGQGTLVTVSS

SEQ ID NO: 24 - protein, 127 aa, Artificial Sequence
  Description of Artificial Sequence: Synthetic polypeptide
QVQLVESGGGLVQAGGSLRLSCAASGRTFSSNPMGWFRQAPGKEREFVAAISWSGGGTYYADSVKGRFTISRDNAKNTVTLQMNSLKPEDTAVYYCASRDYSDPISLWVEDREYDYWGQGTQVTVSS

SEQ ID NO: 25 - protein, 138 aa, Artificial Sequence
  Description of Artificial Sequence: Synthetic polypeptide
QVQLVESGGGLVQAGGSLRLSCAASGRTFSSYAMGWFRQAPGKEREFVAVISWSGGSTYYADSVKGRFTISRDNAKNTVYLQMNSLKPEDTAVYYCASGEQPGSNRPYIPEQPIEFMPTDYPSWYDYWGQGTQVTVSS

SEQ ID NO: 26 - protein, 131 aa, Artificial Sequence
  Description of Artificial Sequence: Synthetic polypeptide
EVQLVESGGGLVQAGGSLRLSCAASGRTFDSYAMGWFRQAPGKEREFVAAISWTGGSTDYADSVKGRFTISRDNAKNTVYLQMDSLKPEDTAVYYCAAEVVGRDVTTMYRVSGLEYEYDYWGQGTQVTVSS

SEQ ID NO: 27 - protein, 124 aa, Artificial Sequence
  Description of Artificial Sequence: Synthetic polypeptide
EVQLVESGGGLVQAGGSLRLSCAASGRTINTYVMGWFRQAPGKEREFVARIDWSGSSTDYADSAKGRFTISRDNAKNTVYLQMNSLKPEDTAVYYCAGSAYYSGYVTHRDFGSWGQGTLVTVSS

SEQ ID NO: 28 - protein, 125 aa, Artificial Sequence
  Description of Artificial Sequence: Synthetic polypeptide
EVQLVESGGGLVQAGGSLRLSCAASGRTFSVYGMGWFRQAPGQERAFVAAISWSDGSTYYADSVKGRFTISRDNAKNTMYLQMNSLKPEDTAVYFCAADLTGWGLDADVSEYDYWGQGTQVTVSS

SEQ ID NO: 29 - protein, 125 aa, Artificial Sequence
  Description of Artificial Sequence: Synthetic polypeptide
QVQLVESGGGLVQAGDSLTLSCAASGRSVGFDTYGMAWFRQAPGKEREFVASIAYNGETTSYADSVQGRFTVTRENAKNTIALRMNGLKPDDTAVYYCAAAQYYLTGTSFPAKFWGQGTLVTVSS

SEQ ID NO: 30 - protein, 131 aa, Artificial Sequence
  Description of Artificial Sequence: Synthetic polypeptide
QVQLVESGGGLVQAGGSLRLSCAASGRTSSIYGMGWFRQAPGKEREFVAAISWSAGRTYHADSVKGRFTISRDNAKNMVYLQMDKMKPGDTAVYYCAARRAPELLSDYTQKPEEIGTYHYWGQGTLVTVSS

SEQ ID NO: 31 - protein, 127 aa, Artificial Sequence
  Description of Artificial Sequence: Synthetic polypeptide
QVQLVESGGGLVQAGGSLRLSCAANGRAANAYAVGWFRQAPGKEREFVAHIRWNGGRTAYADSVKGRFTISRDDAKNTVYLQMDSLKPEDTAVYYCAEDTNPDAFGDLRLPSEYEYWGQGTQVTVSS

SEQ ID NO: 32 - protein, 125 aa, Artificial Sequence
  Description of Artificial Sequence: Synthetic polypeptide
QVQLVESGGGLVQAGDSLRLSCAASGRALSFNTYAMAWFRQAPGKEREFVASITYNGGSTYYADSVKGRFTVTRDNGKDTVTLRMNSLKPDDTAVYYCASAQYWRSGTSFPANYWGQGTLVTVSS

SEQ ID NO: 33 - protein, 120 aa, Artificial Sequence
  Description of Artificial Sequence: Synthetic polypeptide
QVQLVESGGGLVQAGDSLALSCAGSGDTFSNYAMGWFRQAPGKEREFVADISWYGANIGYADSVKGRFTISRDNAKNMVTLRMNSLKPEDTAVYYCAADRNHWPVKGDYWGQGTQVTVSS

SEQ ID NO: 34 - protein, 126 aa, Artificial Sequence
  Description of Artificial Sequence: Synthetic polypeptide
QVQLVESGGGLVQAGDSLRLSCAASGRTRTTYGMGWFRQAPGKEREFVTTITWSGSTNYKYYADSVKGRFTISRDNAKNTVYLQMNSLKPDDTAVYYCAASTVLTDPRVPTEYDYWGQGTQVTVSS

SEQ ID NO: 35 - protein, 124 aa, Artificial Sequence
  Description of Artificial Sequence: Synthetic polypeptide
EVQLVESGGGLVQAGGSLRLSCAASGRTINTYVMGWFRQAPGKEREFVARIDWSGSSTDYADSVKGRFTISRDNAKNTVYLQMNSLKPEDTAVYYCAGSAYYSGYVTHRDFGSWGQGTLVTVSS

SEQ ID NO: 36 - protein, 128 aa, Artificial Sequence
  Description of Artificial Sequence: Synthetic polypeptide
EVQLVESGGGLVQPGGSLRLSCAASGFTFRTYYMGWFRQAPGKEREFVGVTRSSDDVTYYADSVKGRFTISRDNAKNTVYLQMSRLKPEDTAVYYCAAKPVPITRYSFPQIGEEYDYWGQGTLVTVSS

SEQ ID NO: 37 - protein, 126 aa, Artificial Sequence
  Description of Artificial Sequence: Synthetic polypeptide
QVQLVESGGGWVQTGGSLRLSCAASGRTVSSYYMGWFRQTPGKEREFVAAISWVGSSTYKYYTDSAKGRFTISRDNAKNTVYLQMNSLKPEDTAVYYCAARPRVGDPRSRYDDDNWGQGTQVTVSS

SEQ ID NO: 38 - protein, 125 aa, Artificial Sequence
  Description of Artificial Sequence: Synthetic polypeptide
QVQLVESGGGLVQAGDSLRLSCAASGRTLSFDTYAMGWFRQAPGKEREFVASIDWSGGTTYYADSVKGRFTVTRDNAKNTVTLRMNSLKPADTAVYYCAAAQYYRSGTSFPANYWGQGTLVTVSS

SEQ ID NO: 39 - protein, 126 aa, Artificial Sequence
  Description of Artificial Sequence: Synthetic polypeptide
EVQLVESGGRLVQAGGSLRLSCAASGLTRSDYAMGWFRQAPGKEREFVATLKWSEGSRFMYRAEDVKGRFTISSGAAKTTVWLDMDALNPEDTAVYYCAAGFNVGFVRRASEYNFWGQGTLVTVSS

SEQ ID NO: 40 - protein, 122 aa, Artificial Sequence
  Description of Artificial Sequence: Synthetic polypeptide
QVQLVESGGGLVQAGGSLRLSCAASGLSFSSYTMGWFRQVPGKERELISAIHWSGGPTFYSNSVKGRFTISRDNAKDTVYLQMNSLKPEDTAVYYCTAEPVGSMISPDWTYWGQGTLVTVSS

SEQ ID NO: 41 - protein, 128 aa, Artificial Sequence
  Description of Artificial Sequence: Synthetic polypeptide
EVQLVESGGGLVQPGGSLRLSCAASGFTFRTYYMGWFRRAPGKEREFVGVTRSSDDVTYYADSVKGRFTISRDNAKDTVYLQMSRLKPEDTAVYYCAAKPVPITRYSFPQIGEEYDYWGQGTLVTVSS

SEQ ID NO: 42 - protein, 125 aa, Artificial Sequence
  Description of Artificial Sequence: Synthetic polypeptide
QVQLVESGGGLVQAGGSLSLSCAASGRSLSFDTYAMSWFRQAPGKEREFVASIDWNGGSTSYADSMKGRFTISRDNAKNTVNLRIRSLKPDDTAVYFCASARYYIGGTYFPANYWGQGTQVTVSS

SEQ ID NO: 43 - protein, 125 aa, Artificial Sequence
  Description of Artificial Sequence: Synthetic polypeptide
QVQLVESGGGLVQAGGSLRLSCEASGRAFSTYAMGWFRQAPGKEREFVAGIAWSGYSTDYADSVKGRSTISRDNTKNTVWLQMNSLKPEDTAVYYCAGERNFGRVGVKEVEYDYWGQGTQVTVSS

SEQ ID NO: 44 - protein, 121 aa, Artificial Sequence
  Description of Artificial Sequence: Synthetic polypeptide
QVQLVESGGGLVQPGGRLRLSCAASGSIFSIRDMAWYRQAPGKQREWVAIAARGGSTHYADSVKGRFTISRDNAKNTVYLQMNTLEPEDTAAYYCNAEVATMIQPGFRDYWGQGTQVTVSS

SEQ ID NO: 45 - protein, 127 aa, Artificial Sequence
  Description of Artificial Sequence: Synthetic polypeptide
EVQLVESGGGVVQAEDSLRLSCAAPGLPFSSSRMGWFRQAPGKEREFVAAIGWSGRSTYRYYGDSVKGRFTVSGDNAKNTLDLQMKGLKPEDTAVYYCAADPDYYGDYRTSGAWRYWGQGTQVTVSS

SEQ ID NO: 46 - protein, 126 aa, Artificial Sequence
  Description of Artificial Sequence: Synthetic polypeptide
EVQLVESGGGLVQAGDSLRLSCAASGRTFPTYAMGWFRQAPGKEREFVATIRWSGSTQYKYYADFVKGRFTISRDNAKNTVYLQMDSLKPEDTAVYYCAATTLLTDPRALNAYAYWGQGTQVTVSS

SEQ ID NO: 47 - protein, 128 aa, Artificial Sequence
  Description of Artificial Sequence: Synthetic polypeptide
QVQLVESGGGLVQAGGSLRLSCAASGRTFSVYAMGWFRQAPGKERQFVAAITWSGGSTSYADSVKGRFTISRDNAKNTVYLQMNILKPEDTAVYYCAAATNPYFSDYYPDLKYEFDYWGQGTLVTVSS

SEQ ID NO: 48 - protein, 124 aa, Artificial Sequence
  Description of Artificial Sequence: Synthetic polypeptide
EVQLVESGGGLVQAGGSLRLSCAASGRTINGYVMGWFRQAPGEEREFVARIDWSGSSTDYADSVKGRFTISRDNAKITVYLQMNSLKPEDTAVYYCAGSAYYSGYVTHRDFGSWGQGTLVTVSS

SEQ ID NO: 49 - protein, 115 aa, Artificial Sequence
  Description of Artificial Sequence: Synthetic polypeptide
EVQLVESGGGLVQPGGSLRLSCAASGFTFSSFTMTWFRQAPGKGLGWVSRISSDGTGTNYADSVKGRFTISRDNAKNTLYLRMNSLKPEDTAVYYCAIADDSSTRGQGTLVTVSS

SEQ ID NO: 50 - protein, 129 aa, Artificial Sequence
  Description of Artificial Sequence: Synthetic polypeptide
QVQLVESGGGLVQTGGSLRLSCAASGRTFSVYRVGWFRQAPGKEREFVAAVIWSGASTYKYAADSVKGRFTISRDNAENTVYLQMNSLKPEDTAVYYCAADPLGLPGPDVRVEGGYRHWGQGTLVTVSS

SEQ ID NO: 51 - protein, 125 aa, Artificial Sequence
  Description of Artificial Sequence: Synthetic polypeptide
QVQLVESGGGLQQAGGSLRLSCAASGRTVTVMTVGWFRQAPGKEREFVAAITMYGERTYYADSVKGRFTISRDNAKNTVDLQMNSLKPEDAAVYYCAARTYVSGIYDRFDDYNYWGQGTQVTVSS

SEQ ID NO: 52 - protein, 125 aa, Artificial Sequence
  Description of Artificial Sequence: Synthetic polypeptide
EVQLVESGGGLVQAGDSLRLSCAASGRALSFNTYAMAWFRQAPGKEREFVASITYNGGSTYYADSVKGRFTVTRDNGKNTVTLRMNSLKPDDTAVYYCASAQYWRSGTSFPANYWGQGTQVTVSS

SEQ ID NO: 53 - protein, 126 aa, Artificial Sequence
  Description of Artificial Sequence: Synthetic polypeptide
EVQLVESGGGLVQAGDSLRLSCAASGRTFTTYVMGWFRQAPGKEREFVATIAWSGSTNYKYYADSVKGRFTISRDNAKNTVYLRMNSLKPEDTAVYYCAASTVLTDPRRLNEYANWGQGTLVTVSS

SEQ ID NO: 54 - protein, 122 aa, Artificial Sequence
  Description of Artificial Sequence: Synthetic polypeptide
EVQLVESGGGSVQAGGSLRLSCAASGRTFSNYAMGWFRQAPGKEREFVAGISRSGGSTYSADSVKGRFTISRDNAKNTVYLQMNSLKPEDTAVYYCAADGLDYALGFRGDYWGQGTQVTVSS

SEQ ID NO: 55 - protein, 126 aa, Artificial Sequence
  Description of Artificial Sequence: Synthetic polypeptide
EVQLVESGGGLVQAGGSLRLSCAASGRTFGSYSMGWFRQAPGKEREFVGAISWSGSSTYKYYEDSVKGRFTISRDNAKNTVPLQMNSLKPEDTGVYFCGGTMERRDPRRTSAYDYWGQGTLVTVSS

SEQ ID NO: 56 - protein, 122 aa, Artificial Sequence
  Description of Artificial Sequence: Synthetic polypeptide
EVQLVESGGGLVQTGGSLRLSCAASGRTFSTYRMGWFRQAPGKEREFVAAISWSTGSTYYADSVKGRFAISRDNAKNTIYLQMNSLKPEDTAVYYCAAGMVATTRSSAYPYWGQGTQVTVSS

SEQ ID NO: 57 - protein, 124 aa, Artificial Sequence
  Description of Artificial Sequence: Synthetic polypeptide
EVQLVESGGGLVETGGSLRLSCAASGRTESTYTMAWFRQAPGKERERVATISFSGSTTTYLASVQGRFTISRDGAKNTIFLQMNGLKPEDTAVYYCALDTRRRVGSSPRFYDYWGQGTLVTVSS

SEQ ID NO: 58 - protein, 126 aa, Artificial Sequence
  Description of Artificial Sequence: Synthetic polypeptide
QVQLVESGGGLVQAGDSLRLSCAASGRTFTTYGMGWFRQAPGKEREFVTTITWSGSTNYKYYADSVKGRFTISRDNAKNTVYLQMNSLKPDDTAVYYCAASTVLRDPRVPTEYDYWGQGTQVTVSS

SEQ ID NO: 59 - protein, 125 aa, Artificial Sequence
  Description of Artificial Sequence: Synthetic polypeptide
QVQLVESGGGLVQAGGSLRLSCAASGRSLGFDTYGMAWFRQAPGKEREFVASIDWNGGSTYYADSMKGRFTISRDNAKNTVNLRMNSLKPDDTAVYYCAAARYYTSSTYFPANYWGQGTQVTVSS

SEQ ID NO: 60 - protein, 120 aa, Artificial Sequence
  Description of Artificial Sequence: Synthetic polypeptide
EVQLVESGGGLVKAEGSLRLSCVASTSIASINVMGWYRQAPGKERELVARISGGGITHYAESVEGRFTISRDNAKNTVHLQMNGLKPEDTAAYYCKADVFASSGHVTTYWGQGTLVTVSS

SEQ ID NO: 61 - protein, 127 aa, Artificial Sequence
  Description of Artificial Sequence: Synthetic polypeptide
QVQLVESGGGLVQAGGSLRLSCAASGRSFSSYNMVWLRQAPGKEREVVAAVTWSGGGTSYADSVKGRFTISRDNANVRVYLQMTGLKPEDTAIYYCAATQDWYGGSRAFRAASFHSWGQGTLVTVSS

SEQ ID NO: 62 - protein, 126 aa, Artificial Sequence
  Description of Artificial Sequence: Synthetic polypeptide
QVQLVESGGGLVQAGDSLRLSCAASGRTFTTYVMGWFRQPPGKEREFVATISWSGSTTYKYYADSVKGRFTISRDNAKNTVYLQMNSLKPEDTAVYYCAASTVVADPRAPNEYDYWGQGTQVTVSS

SEQ ID NO: 63 - protein, 116 aa, Artificial Sequence
  Description of Artificial Sequence: Synthetic polypeptide
QVQLVESGGGLVQPGGSLRLSCAASGSIFSASVMGWYRQGPGKQREFVARISPGGVTHYADSVKGRFTISKDNAKNTVTLQMNSLKPEDTAVYYCNADRFGFEVYWGQGTLVTVSS

SEQ ID NO: 64 - protein, 121 aa, Artificial Sequence
  Description of Artificial Sequence: Synthetic polypeptide
QVQLVESGGGLVQPGGRLRLSCAASGSIFSIRDMGWYRQAPGKQRELVAIFARGGSTHYADSVKGRFTISRDNAKNTVYLQMNSLEPEDTAAYYCNAEVATMIQPGFRDYWGQGTLVTVSS

SEQ ID NO: 65 - protein, 130 aa, Artificial Sequence
  Description of Artificial Sequence: Synthetic polypeptide
EVQLVESGGGLVQAGGSLRLSCAASGRTFRSYAMGWFRQAPGKEREFVADISWRGGRLYYADSVKGRFTISRDNAKNTVYLQMNSLKPEDTAVYYCAATGDQPAFTTAQGMGAMLEYDYWGQGTLVTVSS

SEQ ID NO: 66 - protein, 127 aa, Artificial Sequence
  Description of Artificial Sequence: Synthetic polypeptide
EVQLVESGGGLVQAGDSLRLSCAASGRTGSSGAMGWFRQGPGKEREFVAALMWRNTVTYSYYADSVKGRFTISRDNAKNTAYLQMNSLKPEDTAVYYCAADPDTYGDPRNSGAYSYWGQGTLVTVSS

SEQ ID NO: 67 - protein, 118 aa, Artificial Sequence
  Description of Artificial Sequence: Synthetic polypeptide
QVQLVESGGGLVQAGESLRLSCAASGDVFDIGTMAWYRQPPGKQRELVASITMGGSTDVADSAKGRFTISRDNAKNTVYLHMDSLKPEDTAVYYCNAQFFWPKRHDYWGQGTQVTVSS

SEQ ID NO: 68 - protein, 116 aa, Artificial Sequence
  Description of Artificial Sequence: Synthetic polypeptide
QVQLVESGGGSVQPGGSLRLSCAASGIDVSISTIMWYRQPPGRQRELVADVIPSGRSTTYTESVKGRFTVTRDNAKNTVYLQMSGLKPEDTAVYYCNAFVRRENYWGQGTQVTVSS

SEQ ID NO: 69 - protein, 127 aa, Artificial Sequence
  Description of Artificial Sequence: Synthetic polypeptide
EVQLVESGGGLVQAGDSLRLSCAASGRTGSSGAMGWFRQGPGKEREFVAALMWRNTVTYKYYEDSVKGRFTISRDNAKNTAYLQMNSLKPEDTAVYYCAADPDTYGDPRNSGAYDYWGQGTLVTVSS

SEQ ID NO: 70 - protein, 125 aa, Artificial Sequence
  Description of Artificial Sequence: Synthetic polypeptide
EVQLVESGGGLVQAGDSLRLSCAASGRTLSFDTYAMAWFRQAPGKEREFVASIDYNGGSTDYADSVKGRFTVTRDNAKNTVTLRMNSLKPDDTAVYYCASARYYRSGTSFPVNYWGQGTQVTVSS

SEQ ID NO: 71 - protein, 128 aa, Artificial Sequence
  Description of Artificial Sequence: Synthetic polypeptide
EVQLVESGGGLVQAGGSLKLACAASGLTFSSYRMGWFRQAPGKEREFVAAIDWNGRGTYYRYYADSVKGRFTISRDNAKNTMCLQMNSLKPEDTAVYYSAIDSRTSIDPRTSGHYRYWGQGTLVTVSS

SEQ ID NO: 72 - protein, 126 aa, Artificial Sequence
  Description of Artificial Sequence: Synthetic polypeptide
EVQLVESGGGLVQAGDSLRLSCAASGRTFTTYVMGWFRQAPGKDREFVATITWSGSTNYKYYADPVKGRFTISRDNAKNTVYLQMNSLKPEDTAVYYCTSSTVVTDPRKLNEYAYWGQGTLVTVSS

SEQ ID NO: 73 - protein, 129 aa, Artificial Sequence
  Description of Artificial Sequence: Synthetic polypeptide
EVQLVESGGGLVQPGGSLRLSCAASGRTFSSYTMGWFRQAPGEEREFVSAISWSSDGTYYKYYTDTVKGRFTISRDNAETTVHLQMNSLKPEDTAVYYCAASSSGTYGDPRSEREYRYWGQGTLVTVSS

SEQ ID NO: 74 - protein, 127 aa, Artificial Sequence
  Description of Artificial Sequence: Synthetic polypeptide
QVQLVESGGGLVQPGGSLRLSCVASGLPFSSSRMAWFAQAPGKEREFVAAIGWRGRTSYKYYADSVKGRFTVSGDNAKKTLDLQMKDLKPEDTALYFCAAHPNDDGDPRISGNYQYWGQGTQVTVSS

SEQ ID NO: 75 - protein, 119 aa, Artificial Sequence
  Description of Artificial Sequence: Synthetic polypeptide
QVQLVESGGGLAQAGGSLTLSCAASGTAAGIDVMGWYRQTPGNSREFVARIFSNDVTHYADSVTGRFTLSRTQDKNTVSLQMNSLKPDDTGVYYCNARIWTGSTTVDYWGQGTQVTVSS

SEQ ID NO: 76 - protein, 121 aa, Artificial Sequence
  Description of Artificial Sequence: Synthetic polypeptide
EVQLVESGGGLVQPGGQLRLSCAASGSIASVRDMAWYRQAPGKQRGLVAIFARGGTTHYADSVKGRFTISRDNAKNTVYLQMNSLEPEDTAAYYCNAEVATMFQPGFRDYWGRGTLVTVSS

SEQ ID NO: 77 - protein, 122 aa, Artificial Sequence
  Description of Artificial Sequence: Synthetic polypeptide
QVQLVESGGGSVQAGGSLRLSCAASGRTFSNYAMGWFRQAPGKEREFVAGISRSGGSTYSADSVKGRFTISRDNAKNTVYLQMNSLKPEDTAVYYCAADGLDYALGFRGDYWGQGTLVTVSS

SEQ ID NO: 78 - protein, 124 aa, Artificial Sequence
  Description of Artificial Sequence: Synthetic polypeptide
QVQLVESGGGLVQAGGSLRLSCAASGRTINGYVMGWFRQAPGKEREFVARIDWSGSSTDYADSVKGRFTISRDNAKTTVYLQTNSLKPEDTAVYYCAGSAYYSGYVTHRDFGSWGQGTQVTVSS

SEQ ID NO: 79 - protein, 123 aa, Artificial Sequence
  Description of Artificial Sequence: Synthetic polypeptide
QVQLVESGGGLVQAGGSLRLSCAASGSIFAINGMGWYRQAPGKQRELVAVITRGGSTNYADSVKGRFTISRDNAKNTVSLQMNSLKPEDTAVYYCAATGVLAGWAAGDGMDYWGKGTLVTVSS

SEQ ID NO: 80 - protein, 130 aa, Artificial Sequence
  Description of Artificial Sequence: Synthetic polypeptide
EVQLVESGGGLVQTGGSLRLSCAASGRTFSPYAMGWFRQAPGKEREFVAAIRWSGATTYKYVGDSVQGRFTISRDAAGNTVYLQMNSVKPEDTAVYYCAADRVPKDISIDPRNPKDWDYWGKGTLVTVSS

SEQ ID NO: 81 - protein, 127 aa, Artificial Sequence
  Description of Artificial Sequence: Synthetic polypeptide
EVQLVESGGGLVRAGGSLRLSCAASGRSFSSYNMGWFRQAPGKERDLVAVVTWSGGGTSYADSVKGRFTISRDNANARLYLEMTSLKPEDTAIYYCAATQDWYGGTRAFHAASFHSWGQGTLVTVSS

SEQ ID NO: 82 - protein, 133 aa, Artificial Sequence
  Description of Artificial Sequence: Synthetic polypeptide
EVQLVESGGGLVQAGGSLRLSCAASGRTFTSYTMGWFRQAPGKEREFVAAIKWNGGSTYYADSVKGRFTISRDNAKNTVYLQMNSLKPEDTAVYYCAADGDPYFSPTDGIVWHAPHQSEYDYWGQGTLVTVSS

SEQ ID NO: 83 - protein, 128 aa, Artificial Sequence
  Description of Artificial Sequence: Synthetic polypeptide
EVQLVESGGGLVQAGGSLRLSCAASGFTFRTYYMGWFRQAPGKEREFVGVTRSSDDVTYYADSVKGRFTISRDNAKNTVYLQMSRLKPEDTAVYYCAAKPVPITRYSFPQIGEEYDYWGQGTLVTVSS

SEQ ID NO: 84 - protein, 124 aa, Artificial Sequence
  Description of Artificial Sequence: Synthetic polypeptide
EVQLVESGGGLVQAGGSLRLSCAASGRTINGYVMGWFRQAPGKEREFVARIDWSGSSTDYADSVKGRFTISRDNAKTTVYLQMNSLKPEDTAVYYCAGSAYYSGYVTHRDFGSWGQGTQVTVSS

SEQ ID NO: 85 - protein, 131 aa, Artificial Sequence
  Description of Artificial Sequence: Synthetic polypeptide
EVQLVESGGGLVQAGGSLRLSCAASGSGRTFTSYTMGWFRQAPGKEREFVSALTWADDSTYYKYYADSMKGRLTISRDNAKNTVYLQMNSLKPEDTAVYYCVATGRGLTYDPRDRRKYDYWGQGTQVTVSS

SEQ ID NO: 86 - protein, 124 aa, Artificial Sequence
  Description of Artificial Sequence: Synthetic polypeptide
EVQLVESGGGLVQAGGSLRLSCAASGRTINTYVTGWFRQAPGKEREFVARIDWSGSSTDYADSVKGRFTISRDNAKNTVYLQMNSLKPEDTAVYYCAGSAYYSGYVTHRDFGSWGQGTQVTVSS

SEQ ID NO: 87 - protein, 126 aa, Artificial Sequence
  Description of Artificial Sequence: Synthetic polypeptide
QVQLVESGGGLVQAGDSLRLSCAASGRTFTTYGMGWFRQGPGKEREFVATITWSGSTNYKYYTDSVKGRFTISRDNAKNTVYLQMNSLKPEDTAVYYCAASTVLTDPRRLNEYDYWGQGTQVTVSS

SEQ ID NO: 88 - protein, 126 aa, Artificial Sequence
  Description of Artificial Sequence: Synthetic polypeptide
EVQLVESGGGLVQAGDSLRLSCAASGRTRTTYGMGWFRQAPGKEREFVTTITWSGPTNYKYYADSVKGRFTISRDNAKNTAYLQMNSLKPDDTAVYYCAASTVLTDPRVPTEYDYWGQGTQVTVSS

SEQ ID NO: 89 - protein, 126 aa, Artificial Sequence
  Description of Artificial Sequence: Synthetic polypeptide
QVQLVESGGGLVQAGDSLRLSCAASGRTFPTYAMGWFRQAPGKEREFVATIRWSGSTQYKYYADFVKGRFTISRDNAKNTVYLQMDSLKPEDTAVYYCAATTLLGDPRALNEYAYWGQGTQVTVSS

SEQ ID NO: 90 - protein, 116 aa, Artificial Sequence
  Description of Artificial Sequence: Synthetic polypeptide
QVQLVESGGGLVQAGGSLRLSCAASGRTFSSYAMGWFRQAPGKEREFAAVITWNGGSTHYADSVKGRFTISRDNAKNTVYLQMNSLKPEDTAVYYCAADPMNSPYWGQGTQVTVSS

SEQ ID NO: 91 - protein, 127 aa, Artificial Sequence
  Description of Artificial Sequence: Synthetic polypeptide
EVQLVESGGGLVQTGESLRLSCAASGRAFSDLRMAWFRQVPGKEREFVAAVEWRGSSRYYYSADSVKGRFTISRTSPKGETYLQMNGLKPEDTAVYYCAAVSPVVGDPRNSDTYNYWGQGTQVTVSS

SEQ ID NO: 92 - protein, 125 aa, Artificial Sequence
  Description of Artificial Sequence: Synthetic polypeptide
EVQLVESGGGLVQAGGSLRLSCAASGRTFSPYGMGWFRQTPGKERAFVAAVDWNDGSTYYSDSVKGRFTISRDNAKNTVYLQMNSLKSEDTAVYYCAADLTGWGLDADVSEYDYWGQGTLVTVSS

SEQ ID NO: 93 - protein, 127 aa, Artificial Sequence
  Description of Artificial Sequence: Synthetic polypeptide
EVQLVESGGGVVQAEDSLRLSCAASGLPFSSSRMGWFRQVPGKEREFVAAIGWSGRSTYRYYDDSVKGRFTVSGDNAKNTLDLQMKGLKPEDTAVYYCAADPNYYGDVRTSGTYQYWGQGTQVTVSS

SEQ ID NO: 94 - protein, 120 aa, Artificial Sequence
  Description of Artificial Sequence: Synthetic polypeptide
QVQLVESGGGLVQAGDSLALSCAGSGDTFSNYAMGWFRQAPGKEREFVADISWYSANIGYADSVKGRFTISRDNAKNMVTLRMNSLKPEDTAVYYCAADRNHWPVKGDYWGQGTQVTVSS

SEQ ID NO: 95 - protein, 126 aa, Artificial Sequence
  Description of Artificial Sequence: Synthetic polypeptide
QVQLVESGGGLVQAGGSLRLSCAASGRAFSQYTMGWFRQAPGKEREFVTAIRWSGGSIYKYYADSVKGRFTISGDNARNTVDLQMNSLKPEDTAVYYCAARMSPWGDPRGNEYDYWGQGTLVTVSS

SEQ ID NO: 96 - protein, 126 aa, Artificial Sequence
  Description of Artificial Sequence: Synthetic polypeptide
QVQLVESGGGLVQPGGSLRLSCAASGRTSSISTMGWFRQAPGKEREFVTAIRWSGSSSYKYYADSVKGRFTISRDNARNTVYLQMNSLKPEDTAVYYCAAQMSLWRDPREIDYDYWGQGTLVTVSS

SEQ ID NO: 97 - protein, 127 aa, Artificial Sequence
  Description of Artificial Sequence: Synthetic polypeptide
EVQLVESGGGLVQPGGSLRLSCVASGLPGSSSRMAWFAQAPGKEREFVAAIAWRGRTSYKYYSDSVKGRFTVSGDNAKRTLDLQMKDLNPEDTALYFCAAHPNDDGDPRISGNYQYWGQGTQVTVSS

SEQ ID NO: 98 - protein, 128 aa, Artificial Sequence
  Description of Artificial Sequence: Synthetic polypeptide
QVQLVESGGGLVQAGGSLRLSCAASGRTFSSYAMGWFRQAPGKEREFVAAIHWNGASTYRYSADSVKGRFTISRDNAKNTVYLQMNSLKPEDTAAYYCAASPPPTVGDVRDPANYDSWGQGTLVTVSS

SEQ ID NO: 99 - protein, 123 aa, Artificial Sequence
  Description of Artificial Sequence: Synthetic polypeptide
EVQLVESGGGLVQAGGSLRLSCAASGRTFSRYAMGWFRQAPGKEREFVAAIAWSGGAIYYADFVKGQFTISRDNAKNTVDLEMNRLKPEDTAVYYCGSTRDPRVGDKKFYDYWGQGTQVTVSS

SEQ ID NO: 100 - protein, 127 aa, Artificial Sequence
  Description of Artificial Sequence: Synthetic polypeptide
QVQLVESGGGLVQAGGSLRLSCAASGRSFSSYNMGWFRQAPGKERDLVAVVTWSGGGTSYADSVKGRFTIARDNANARLYLEMTSLKPEDTAIYYCAATQDWYGGTRAFRAASFHSWGQGTQVTVSS

SEQ ID NO: 101 - protein, 121 aa, Artificial Sequence
  Description of Artificial Sequence: Synthetic polypeptide
EVQLVESGGGLAQAGGSLRLSCTASGTISKIDVMAWYRQTPGNERELVARIFSNDVTHYVDSAKGRFTLSRAQDKNTVDLQMNSLEPDDAAVYYCNAQIWSDMRGRMDTYWGQGTLVTVSS

SEQ ID NO: 102 - protein, 126 aa, Artificial Sequence
  Description of Artificial Sequence: Synthetic polypeptide
EVQLVESGGGLVQSGGSLRLSCAASGRTFDQFTVGWFRQAPGKEREFVTAIRWSGSTTYRYYADSVKGRFTISRDNARNTVDLQMNSLKPEDSAVYYCAGQMSQWSDPRGDDYDSWGQGTLVTVSS

SEQ ID NO: 103 - protein, 130 aa, Artificial Sequence
  Description of Artificial Sequence: Synthetic polypeptide
QVQLVESGGGLVQTGGSLRLSCAASGRTFSPYAMGWFRQAPGKEREFVAAIRWSGATTYKYVGDSVQGRFTISRDAAGNTVYLQMNSVKPEDTAVYYCAADRVPKDISIDPRNPKDWDYWGKGTLVTVSS

SEQ ID NO: 104 - protein, 121 aa, Artificial Sequence
  Description of Artificial Sequence: Synthetic polypeptide
EVQLVESGGGLVQSGGQLRLSCAASGSIASIRDMAWYRQAPGKQRELVAIFARGGTTHYADSVKGRFTISRDNAKNTVYLQMNSLEPEDTAAYYCNAEVATMFQPGFRDYWGRGTLVTVSS

SEQ ID NO: 105 - protein, 128 aa, Artificial Sequence
  Description of Artificial Sequence: Synthetic polypeptide
EVQLVESGGGLVQAGGSLRLSCAASGRTFSSDAVGWFRQAPGKEREFVAHIHWSGDFTTYYYYGDFVKGRFTISRGTAKNTVYLQMNSLKPEDTAVYYCAAPKGAIGDPRSTREYDYWGQGTLVTVSS

SEQ ID NO: 106 - protein, 124 aa, Artificial Sequence
  Description of Artificial Sequence: Synthetic polypeptide
QVQLVESGGGLVQAGGSLRLSCAASGRTINTYVMGWFRQAPGKEREFVARIDWSGSSTDYADSVKGRFTISRDNAKNTVYLQMNSLKPEDTAVYYCAGSAYYSGYVTHRDFGSWGQGTLVTVSS

SEQ ID NO: 107 - protein, 127 aa, Artificial Sequence
  Description of Artificial Sequence: Synthetic polypeptide
QVQLVESGGGLVQAGGSLRLSCAASGRTFSSNPMGWFRQAPGKEREFVAAISWSGGGTYYADSVKGRFTISRDNAKNTVTLQMNSLKPEDTAVYYCASRDYSDPISLWVEDREYDYWGQGTLVTVSS

SEQ ID NO: 108 - protein, 127 aa, Artificial Sequence
  Description of Artificial Sequence: Synthetic polypeptide
EVQLVESGGGVVQAEDSLRLSCAASGLPFSSSRMGWFRQAPGKEREFVAAIGWSGRSTYKYYADSVKGRFTVSGDNAKKTLDLQMKDLKPEDTAVYYCAAHPDYYGDPRTSGAYRYWGQGTQVTVSS

SEQ ID NO: 109 - protein, 131 aa, Artificial Sequence
  Description of Artificial Sequence: Synthetic polypeptide
QVQLVESGGGLVQAGDSLRLSCAASGRTSSLYNMGWFRQAPGQEREFVAAIHWGGGRTYYADSVKGRFTISRDNAKNTVYLQMNSLEPGDTANYYCAARRAPELLDDYKQKPEEIGAYHYWGQGTQVTVSS

SEQ ID NO: 110 - protein, 125 aa, Artificial Sequence
  Description of Artificial Sequence: Synthetic polypeptide
EVQLVESGGGLVQAGGSLRLSCAASGRTFSVYGMGWFRQAPGQERAFVAAISWSDGSTYYADSVKGRFTISRDNAKNTMYLQMNSLKPEDTAVYFCAADLTGWGLDADVSEYDYWGQGTLVTVSS

SEQ ID NO: 111 - protein, 121 aa, Artificial Sequence
  Description of Artificial Sequence: Synthetic polypeptide
EVQLVESGGGLVQPGGQLRLSCAASGSIASIRDMAWYRQAPGKQRELVAIFARGGTTHYADSVKGRFTISRDNAKNTVYLQVNSLEPEDTAAYYCNAEVATMFQPGFRDYWGRGTQVTVSS

SEQ ID NO: 112 - protein, 129 aa, Artificial Sequence
  Description of Artificial Sequence: Synthetic polypeptide
QVQLVESGGGLVQAGGSLRLSCAASGRAFSSGRMGWFRQAPGKEREFVAAISWSGHTTYKYYADSVKGRFTISRENAKNTVSLQMNSLKPEDTAVYYCAARQSLVAGGDPRGQSEYDYWGQGTLVTVSS

SEQ ID NO: 113 - protein, 127 aa, Artificial Sequence
  Description of Artificial Sequence: Synthetic polypeptide
EVQLVESGGGLVQAGGSLRLSCAASGRTFSSNPMGWFRQAPGKEREFVAAISWSGGGTYYADSVKGRFTISRDNAKNTVTLQMNSLKPEDTAVYYCASRDYSDPISLWVEDREYDYWGQGTQVTVSS

SEQ ID NO: 114 - protein, 125 aa, Artificial Sequence
  Description of Artificial Sequence: Synthetic polypeptide
QVQLVESGGGLVQAGDSLRLSCAASGRTLSFDTYAMAWFRQAPGKEREFVASIDWNGVNTYYADSVKGRFTVTRDNTKNTVTLRMNSLKTDDTAVYYCAAAQYYRSGTSFPANSWGQGTQVTVSS

SEQ ID NO: 115 - protein, 121 aa, Artificial Sequence
  Description of Artificial Sequence: Synthetic polypeptide
EVQLVESGGGLVQPGGSLRLSCVVSGSFFSLRDMGWYRQAPGKERELVGIFTRGGTTYYADSVKGRFTISRDNAKNTVDLQMNSLKPEDTAVYTCNAEIRQYSANLYRDFWGQGTQVTVSS

SEQ ID NO: 116 - protein, 121 aa, Artificial Sequence
  Description of Artificial Sequence: Synthetic polypeptide
EVQLVESGGGLVQPGGRLRLSCAASGSIFSIRDMGWYRQAPGKQRELVAIFARGGSTHYADSVKGRFTISRDNAKNTVYLQMNSLEPEDTAAYYCNAEVATMIQPGFRDYWGQGTQVTVSS

SEQ ID NO: 117 - protein, 125 aa, Artificial Sequence
  Description of Artificial Sequence: Synthetic polypeptide
QVQLVESGGGLVQAGGSLRLSCAASGRTFSVYGMGWFRQAPGQERAFVAAISWSDGSTYYADSVKGRFTISRDNAKNTMYLQMNSLKPEDTAVYFCAADLTGWGLDADVSEYDYWGQGTQVTVSS

SEQ ID NO: 118 - protein, 138 aa, Artificial Sequence
  Description of Artificial Sequence: Synthetic polypeptide
QVQLVESGGGLVQAGGSLRLSCAASGRTFSSYAMGWFRQAPGKEREFVAVISWSGGSTYYADSVKGRFTISRDNAKNTVYLQMNSLKPEDTAVYYCASGEQPGSNRPYIPEQPIEFMPTDYPSWYDYWGQGTLVTVSS

SEQ ID NO: 119 - protein, 123 aa, Artificial Sequence
  Description of Artificial Sequence: Synthetic polypeptide
EVQLVESGGGSVRPGGSLTLSCATSGPTTSTFAMGWFRQSPGNEREIVAAISWTGWATYYPDSVKGRFTISRNAAKNAVDLHMTNLKSEDTAVYYCAFHPDSDPIGLSGYDYWGQGTLVTVSS

SEQ ID NO: 120 - protein, 123 aa, Artificial Sequence
  Description of Artificial Sequence: Synthetic polypeptide
EVQLVESGGGLVQAGGSLRLSCAASGRTLRSYIVGWFRQAPGKEREFVAAVTWSDGRRVTADPVKGRFTISRDNAKNTVYLQMDSLKPEDAAVYYCAVSHGGAYVESRAYEYWGQGTQVTVSS

SEQ ID NO: 121 - protein, 124 aa, Artificial Sequence
  Description of Artificial Sequence: Synthetic polypeptide
EVQLVESGGGLVQAGGSLRLSCAASGRTINTYVMGWFRQAPGKEREFVARIDWSGSSTDYADSVKGRFTTSRDNAKNTVYLQMNGLKPEDTAVYYCAGSAYYSGYVTHRDFGSWGQGTLVTVSS

SEQ ID NO: 122 - protein, 125 aa, Artificial Sequence
  Description of Artificial Sequence: Synthetic polypeptide
QVQLVESGGGLVQRGGSLRLSCAASGRSLGFDTYAMGWFRQAPGKEREFVASIDWNGGNTYYADSVKGRFTISRDNAKNTVNLRMNSLKPDDTAAYYCAAARYYTSGTYFPANYWGRGTLVTVSS

SEQ ID NO: 123 - protein, 10 aa, Artificial Sequence
  Description of Artificial Sequence: Synthetic peptide
GRTFTTYGVG

SEQ ID NO: 124 - protein, 12 aa, Artificial Sequence
  Description of Artificial Sequence: Synthetic peptide
TITWSGSTNYKY

SEQ ID NO: 125 - protein, 15 aa, Artificial Sequence
  Description of Artificial Sequence: Synthetic peptide
STVLTDPRVPTEYDY

SEQ ID NO: 126 - protein, 5 aa, Artificial Sequence
  Description of Artificial Sequence: Synthetic peptide
TYGVG

SEQ ID NO: 127 - protein, 19 aa, Artificial Sequence
  Description of Artificial Sequence: Synthetic peptide
TITWSGSTNYKYYADSVKG

SEQ ID NO: 128 - protein, 15 aa, Artificial Sequence
  Description of Artificial Sequence: Synthetic peptide
STVLTDPRVPTEYDY

SEQ ID NO: 129 - protein, 7 aa, Artificial Sequence
  Description of Artificial Sequence: Synthetic peptide
GRTFTTY

SEQ ID NO: 130 - protein, 8 aa, Artificial Sequence
  Description of Artificial Sequence: Synthetic peptide
TWSGSTNY

SEQ ID NO: 131 - protein, 14 aa, Artificial Sequence
  Description of Artificial Sequence: Synthetic peptide
STVLTDPRVPTEYD

SEQ ID NO: 132 - protein, 8 aa, Artificial Sequence
  Description of Artificial Sequence: Synthetic peptide
GRTFTTYG

SEQ ID NO: 133 - protein, 10 aa, Artificial Sequence
  Description of Artificial Sequence: Synthetic peptide
ITWSGSTNYK

SEQ ID NO: 134 - protein, 17 aa, Artificial Sequence
  Description of Artificial Sequence: Synthetic peptide
AASTVLTDPRVPTEYDY

SEQ ID NO: 135 - protein, 6 aa, Artificial Sequence
  Description of Artificial Sequence: Synthetic peptide
TTYGVG

SEQ ID NO: 136 - protein, 15 aa, Artificial Sequence
  Description of Artificial Sequence: Synthetic peptide
FVTTITWSGSTNYKY

SEQ ID NO: 137 - protein, 16 aa, Artificial Sequence
  Description of Artificial Sequence: Synthetic peptide
AASTVLTDPRVPTEYD

SEQ ID NO: 138 - protein, 10 aa, Artificial Sequence
  Description of Artificial Sequence: Synthetic peptide
GRTFSSLTMA

SEQ ID NO: 139 - protein, 12 aa, Artificial Sequence
  Description of Artificial Sequence: Synthetic peptide
AQKWAGATTYTY

SEQ ID NO: 140 - protein, 17 aa, Artificial Sequence
  Description of Artificial Sequence: Synthetic peptide
DTSSIVGDPRSPNRYDY

SEQ ID NO: 141 - protein, 5 aa, Artificial Sequence
  Description of Artificial Sequence: Synthetic peptide
SLTMA

SEQ ID NO: 142 - protein, 19 aa, Artificial Sequence
  Description of Artificial Sequence: Synthetic peptide
AQKWAGATTYTYYGDSVKG

SEQ ID NO: 143 - protein, 17 aa, Artificial Sequence
  Description of Artificial Sequence: Synthetic peptide
DTSSIVGDPRSPNRYDY

SEQ ID NO: 144 - protein, 7 aa, Artificial Sequence
  Description of Artificial Sequence: Synthetic peptide
GRTFSSL

SEQ ID NO: 145 - protein, 8 aa, Artificial Sequence
  Description of Artificial Sequence: Synthetic peptide
KWAGATTY

SEQ ID NO: 146 - protein, 16 aa, Artificial Sequence
  Description of Artificial Sequence: Synthetic peptide
DTSSIVGDPRSPNRYD

SEQ ID NO: 147 - protein, 8 aa, Artificial Sequence
  Description of Artificial Sequence: Synthetic peptide
GRTFSSLT

SEQ ID NO: 148 - protein, 10 aa, Artificial Sequence
  Description of Artificial Sequence: Synthetic peptide
QKWAGATTYT

SEQ ID NO: 149 - protein, 19 aa, Artificial Sequence
  Description of Artificial Sequence: Synthetic peptide
AADTSSIVGDPRSPNRYDY

SEQ ID NO: 150 - protein, 6 aa, Artificial Sequence
  Description of Artificial Sequence: Synthetic peptide
SSLTMA

SEQ ID NO: 151 - protein, 15 aa, Artificial Sequence
  Description of Artificial Sequence: Synthetic peptide
FVAAQKWAGATTYTY

SEQ ID NO: 152 - protein, 18 aa, Artificial Sequence
  Description of Artificial Sequence: Synthetic peptide
AADTSSIVGDPRSPNRYD

SEQ ID NO: 153 - protein, 10 aa, Artificial Sequence
  Description of Artificial Sequence: Synthetic peptide
GRTINTYVMG

SEQ ID NO: 154 - protein, 10 aa, Artificial Sequence
  Description of Artificial Sequence: Synthetic peptide
RIDWSGSSTD

SEQ ID NO: 155 - protein, 15 aa, Artificial Sequence
  Description of Artificial Sequence: Synthetic peptide
SAYYSGYVTHRDFGS

SEQ ID NO: 156 - protein, 5 aa, Artificial Sequence
  Description of Artificial Sequence: Synthetic peptide
TYVMG

SEQ ID NO: 157 - protein, 17 aa, Artificial Sequence
  Description of Artificial Sequence: Synthetic peptide
RIDWSGSSTDYADSVKG

SEQ ID NO: 158 - protein, 15 aa, Artificial Sequence
  Description of Artificial Sequence: Synthetic peptide
SAYYSGYVTHRDFGS

SEQ ID NO: 159 - protein, 7 aa, Artificial Sequence
  Description of Artificial Sequence: Synthetic peptide
GRTINTY

SEQ ID NO: 160 - protein, 6 aa, Artificial Sequence
  Description of Artificial Sequence: Synthetic peptide
DWSGSS

SEQ ID NO: 161 - protein, 14 aa, Artificial Sequence
  Description of Artificial Sequence: Synthetic peptide
SAYYSGYVTHRDFG

SEQ ID NO: 162 - protein, 8 aa, Artificial Sequence
  Description of Artificial Sequence: Synthetic peptide
GRTINTYV

SEQ ID NO: 163 - protein, 8 aa, Artificial Sequence
  Description of Artificial Sequence: Synthetic peptide
IDWSGSST

SEQ ID NO: 164 - protein, 17 aa, Artificial Sequence
  Description of Artificial Sequence: Synthetic peptide
AGSAYYSGYVTHRDFGS

SEQ ID NO: 165 - protein, 6 aa, Artificial Sequence
  Description of Artificial Sequence: Synthetic peptide
NTYVMG

SEQ ID NO: 166 - protein, 13 aa, Artificial Sequence
  Description of Artificial Sequence: Synthetic peptide
FVARIDWSGSSTD

SEQ ID NO: 167 - protein, 16 aa, Artificial Sequence
  Description of Artificial Sequence: Synthetic peptide
AGSAYYSGYVTHRDFG

SEQ ID NO: 168 - protein, 12 aa, Artificial Sequence
  Description of Artificial Sequence: Synthetic peptide
GRSLSFDTYAMG

SEQ ID NO: 169 - protein, 10 aa, Artificial Sequence
  Description of Artificial Sequence: Synthetic peptide
SIDWNGGSTY

SEQ ID NO: 170 - protein, 14 aa, Artificial Sequence
  Description of Artificial Sequence: Synthetic peptide
ARYYTSGTYFPANY

SEQ ID NO: 171 - protein, 7 aa, Artificial Sequence
  Description of Artificial Sequence: Synthetic peptide
FDTYAMG

SEQ ID NO: 172 - protein, 17 aa, Artificial Sequence
  Description of Artificial Sequence: Synthetic peptide
SIDWNGGSTYYADSVKG

SEQ ID NO: 173 - protein, 14 aa, Artificial Sequence
  Description of Artificial Sequence: Synthetic peptide
ARYYTSGTYFPANY

SEQ ID NO: 174 - protein, 9 aa, Artificial Sequence
  Description of Artificial Sequence: Synthetic peptide
GRSLSFDTY

SEQ ID NO: 175 - protein, 6 aa, Artificial Sequence
  Description of Artificial Sequence: Synthetic peptide
DWNGGS

SEQ ID NO: 176 - protein, 13 aa, Artificial Sequence
  Description of Artificial Sequence: Synthetic peptide
ARYYTSGTYFPAN

SEQ ID NO: 177 - protein, 10 aa, Artificial Sequence
  Description of Artificial Sequence: Synthetic peptide
GRSLSFDTYA

SEQ ID NO: 178 - protein, 8 aa, Artificial Sequence
  Description of Artificial Sequence: Synthetic peptide
IDWNGGST

SEQ ID NO: 179 - protein, 16 aa, Artificial Sequence
  Description of Artificial Sequence: Synthetic peptide
AAARYYTSGTYFPANY

SEQ ID NO: 180 - protein, 8 aa, Artificial Sequence
  Description of Artificial Sequence: Synthetic peptide
SFDTYAMG

SEQ ID NO: 181 - protein, 13 aa, Artificial Sequence
  Description of Artificial Sequence: Synthetic peptide
FVASIDWNGGSTY

SEQ ID NO: 182 - protein, 15 aa, Artificial Sequence
  Description of Artificial Sequence: Synthetic peptide
AAARYYTSGTYFPAN

SEQ ID NO: 183 - protein, 10 aa, Artificial Sequence
  Description of Artificial Sequence: Synthetic peptide
GRTFSNYGMG

SEQ ID NO: 184 - protein, 12 aa, Artificial Sequence
  Description of Artificial Sequence: Synthetic peptide
GITRSGRTTYYY

SEQ ID NO: 185 - protein, 17 aa, Artificial Sequence
  Description of Artificial Sequence: Synthetic peptide
RQGENNYDPRSGSAYNY

SEQ ID NO: 186 - protein, 5 aa, Artificial Sequence
  Description of Artificial Sequence: Synthetic peptide
NYGMG

SEQ ID NO: 187 - protein, 19 aa, Artificial Sequence
  Description of Artificial Sequence: Synthetic peptide
GITRSGRTTYYYYADAVKG

SEQ ID NO: 188 - protein, 17 aa, Artificial Sequence
  Description of Artificial Sequence: Synthetic peptide
RQGENNYDPRSGSAYNY

SEQ ID NO: 189 - protein, 7 aa, Artificial Sequence
  Description of Artificial Sequence: Synthetic peptide
GRTFSNY

SEQ ID NO: 190 - protein, 8 aa, Artificial Sequence
  Description of Artificial Sequence: Synthetic peptide
TRSGRTTY

SEQ ID NO: 191 - protein, 16 aa, Artificial Sequence
  Description of Artificial Sequence: Synthetic peptide
RQGENNYDPRSGSAYN

SEQ ID NO: 192 - protein, 8 aa, Artificial Sequence
  Description of Artificial Sequence: Synthetic peptide
GRTFSNYG

SEQ ID NO: 193 - protein, 10 aa, Artificial Sequence
  Description of Artificial Sequence: Synthetic peptide
ITRSGRTTYY

SEQ ID NO: 194 - protein, 19 aa, Artificial Sequence
  Description of Artificial Sequence: Synthetic peptide
AARQGENNYDPRSGSAYNY

SEQ ID NO: 195 - protein, 6 aa, Artificial Sequence
  Description of Artificial Sequence: Synthetic peptide
SNYGMG

SEQ ID NO: 196 - protein, 15 aa, Artificial Sequence
  Description of Artificial Sequence: Synthetic peptide
FVAGITRSGRTTYYY

SEQ ID NO: 197 - protein, 18 aa, Artificial Sequence
  Description of Artificial Sequence: Synthetic peptide
AARQGENNYDPRSGSAYN

SEQ ID NO: 198 - protein, 12 aa, Artificial Sequence
  Description of Artificial Sequence: Synthetic peptide
GRALSFNTYAMA

SEQ ID NO: 199 - protein, 10 aa, Artificial Sequence
  Description of Artificial Sequence: Synthetic peptide
SITYNGGSTY

SEQ ID NO: 200 - protein, 14 aa, Artificial Sequence
  Description of Artificial Sequence: Synthetic peptide
AQYWRSGTSFPANY

SEQ ID NO: 201 - protein, 7 aa, Artificial Sequence
  Description of Artificial Sequence: Synthetic peptide
FNTYAMA

SEQ ID NO: 202 - protein, 17 aa, Artificial Sequence
  Description of Artificial Sequence: Synthetic peptide
SITYNGGSTYYADSVRG

SEQ ID NO: 203 - protein, 14 aa, Artificial Sequence
  Description of Artificial Sequence: Synthetic peptide
AQYWRSGTSFPANY

SEQ ID NO: 204 - protein, 9 aa, Artificial Sequence
  Description of Artificial Sequence: Synthetic peptide
GRALSFNTY

SEQ ID NO: 205 - protein, 6 aa, Artificial Sequence
  Description of Artificial Sequence: Synthetic peptide
TYNGGS

SEQ ID NO: 206 - protein, 13 aa, Artificial Sequence
  Description of Artificial Sequence: Synthetic peptide
AQYWRSGTSFPAN

SEQ ID NO: 207 - protein, 10 aa, Artificial Sequence
  Description of Artificial Sequence: Synthetic peptide
GRALSFNTYA

SEQ ID NO: 208 - protein, 8 aa, Artificial Sequence
  Description of Artificial Sequence: Synthetic peptide
ITYNGGST

SEQ ID NO: 209 - protein, 16 aa, Artificial Sequence
  Description of Artificial Sequence: Synthetic peptide
ASAQYWRSGTSFPANY

SEQ ID NO: 210 - protein, 8 aa, Artificial Sequence
  Description of Artificial Sequence: Synthetic peptide
SFNTYAMA

SEQ ID NO: 211 - protein, 13 aa, Artificial Sequence
  Description of Artificial Sequence: Synthetic peptide
FVASITYNGGSTY

SEQ ID NO: 212 - protein, 15 aa, Artificial Sequence
  Description of Artificial Sequence: Synthetic peptide
ASAQYWRSGTSFPAN

SEQ ID NO: 213 - protein, 13 aa, Artificial Sequence
  Description of Artificial Sequence: Synthetic peptide
GMPDNIFSIKTMG

SEQ ID NO: 214 - protein, 9 aa, Artificial Sequence
  Description of Artificial Sequence: Synthetic peptide
AITSGGSTN

SEQ ID NO: 215 - protein, 12 aa, Artificial Sequence
  Description of Artificial Sequence: Synthetic peptide
DLTYIRFQDMEY

SEQ ID NO: 216 - protein, 8 aa, Artificial Sequence
  Description of Artificial Sequence: Synthetic peptide
IFSIKTMG

SEQ ID NO: 217 - protein, 16 aa, Artificial Sequence
  Description of Artificial Sequence: Synthetic peptide
AITSGGSTNYGDSVKD

SEQ ID NO: 218 - protein, 12 aa, Artificial Sequence
  Description of Artificial Sequence: Synthetic peptide
DLTYIRFQDMEY

SEQ ID NO: 219 - protein, 10 aa, Artificial Sequence
  Description of Artificial Sequence: Synthetic peptide
GMPDNIFSIK

SEQ ID NO: 220 - protein, 5 aa, Artificial Sequence
  Description of Artificial Sequence: Synthetic peptide
TSGGS

SEQ ID NO: 221 - protein, 11 aa, Artificial Sequence
  Description of Artificial Sequence: Synthetic peptide
DLTYIRFQDME

SEQ ID NO: 222 - protein, 11 aa, Artificial Sequence
  Description of Artificial Sequence: Synthetic peptide
GMPDNIFSIKT

SEQ ID NO: 223 - protein, 7 aa, Artificial Sequence
  Description of Artificial Sequence: Synthetic peptide
ITSGGST

SEQ ID NO: 224 - protein, 14 aa, Artificial Sequence
  Description of Artificial Sequence: Synthetic peptide
HADLTYIRFQDMEY

SEQ ID NO: 225 - protein, 9 aa, Artificial Sequence
  Description of Artificial Sequence: Synthetic peptide
NIFSIKTMG

SEQ ID NO: 226 - protein, 12 aa, Artificial Sequence
  Description of Artificial Sequence: Synthetic peptide
LVAAITSGGSTN

SEQ ID NO: 227 - protein, 13 aa, Artificial Sequence
  Description of Artificial Sequence: Synthetic peptide
HADLTYIRFQDME

SEQ ID NO: 228 - protein, 10 aa, Artificial Sequence
  Description of Artificial Sequence: Synthetic peptide
GLTFSSYTMG

SEQ ID NO: 229 - protein, 10 aa, Artificial Sequence
  Description of Artificial Sequence: Synthetic peptide
AISWGGASTW

SEQ ID NO: 230 - protein, 15 aa, Artificial Sequence
  Description of Artificial Sequence: Synthetic peptide
GRNNGYATAVRAYDY

SEQ ID NO: 231 - protein, 5 aa, Artificial Sequence
  Description of Artificial Sequence: Synthetic peptide
SYTMG

SEQ ID NO: 232 - protein, 17 aa, Artificial Sequence
  Description of Artificial Sequence: Synthetic peptide
AISWGGASTWYADSVKG

SEQ ID NO: 233 - protein, 15 aa, Artificial Sequence
  Description of Artificial Sequence: Synthetic peptide
GRNNGYATAVRAYDY

SEQ ID NO: 234 - protein, 7 aa, Artificial Sequence
  Description of Artificial Sequence: Synthetic peptide
GLTFSSY

SEQ ID NO: 235 - protein, 6 aa, Artificial Sequence
  Description of Artificial Sequence: Synthetic peptide
SWGGAS

SEQ ID NO: 236 - protein, 14 aa, Artificial Sequence
  Description of Artificial Sequence: Synthetic peptide
GRNNGYATAVRAYD

SEQ ID NO: 237 - protein, 8 aa, Artificial Sequence
  Description of Artificial Sequence: Synthetic peptide
GLTFSSYT

SEQ ID NO: 238 - protein, 8 aa, Artificial Sequence
  Description of Artificial Sequence: Synthetic peptide
ISWGGAST

SEQ ID NO: 239 - protein, 17 aa, Artificial Sequence
  Description of Artificial Sequence: Synthetic peptide
AKGRNNGYATAVRAYDY

SEQ ID NO: 240 - protein, 6 aa, Artificial Sequence
  Description of Artificial Sequence: Synthetic peptide
SSYTMG

SEQ ID NO: 241 - protein, 13 aa, Artificial Sequence
  Description of Artificial Sequence: Synthetic peptide
FVAAISWGGASTW

SEQ ID NO: 242 - protein, 16 aa, Artificial Sequence
  Description of Artificial Sequence: Synthetic peptide
AKGRNNGYATAVRAYD

SEQ ID NO: 243 - protein, 10 aa, Artificial Sequence
  Description of Artificial Sequence: Synthetic peptide
GRTLSVDRMG

SEQ ID NO: 244 - protein, 12 aa, Artificial Sequence
  Description of Artificial Sequence: Synthetic peptide
ARTWSGSSTYIY

SEQ ID NO: 245 - protein, 17 aa, Artificial Sequence
  Description of Artificial Sequence: Synthetic peptide
DVRGGSYDVRRDEGYAY

SEQ ID NO: 246 - protein, 5 aa, Artificial Sequence
  Description of Artificial Sequence: Synthetic peptide
VDRMG

SEQ ID NO: 247 - protein, 19 aa, Artificial Sequence
  Description of Artificial Sequence: Synthetic peptide
ARTWSGSSTYIYYADSVKG

SEQ ID NO: 248 - protein, 17 aa, Artificial Sequence
  Description of Artificial Sequence: Synthetic peptide
DVRGGSYDVRRDEGYAY

SEQ ID NO: 249 - protein, 7 aa, Artificial Sequence
  Description of Artificial Sequence: Synthetic peptide
GRTLSVD

SEQ ID NO: 250 - protein, 8 aa, Artificial Sequence
  Description of Artificial Sequence: Synthetic peptide
TWSGSSTY

SEQ ID NO: 251 - protein, 16 aa, Artificial Sequence
  Description of Artificial Sequence: Synthetic peptide
DVRGGSYDVRRDEGYA

SEQ ID NO: 252 - protein, 8 aa, Artificial Sequence
  Description of Artificial Sequence: Synthetic peptide
GRTLSVDR

SEQ ID NO: 253 - protein, 10 aa, Artificial Sequence
  Description of Artificial Sequence: Synthetic peptide
RTWSGSSTYI

SEQ ID NO: 254 - protein, 19 aa, Artificial Sequence
  Description of Artificial Sequence: Synthetic peptide
AADVRGGSYDVRRDEGYAY

SEQ ID NO: 255 - protein, 6 aa, Artificial Sequence
  Description of Artificial Sequence: Synthetic peptide
SVDRMG

SEQ ID NO: 256 - protein, 15 aa, Artificial Sequence
  Description of Artificial Sequence: Synthetic peptide
FIAARTWSGSSTYIY

SEQ ID NO: 257 - protein, 18 aa, Artificial Sequence
  Description of Artificial Sequence: Synthetic peptide
AADVRGGSYDVRRDEGYA

SEQ ID NO: 258 - protein, 10 aa, Artificial Sequence
  Description of Artificial Sequence: Synthetic peptide
GRTFSDYAMG

SEQ ID NO: 259 - protein, 10 aa, Artificial Sequence
  Description of Artificial Sequence: Synthetic peptide
AITWNGGSTY

SEQ ID NO: 260 - protein, 13 aa, Artificial Sequence
  Description of Artificial Sequence: Synthetic peptide
DPLNSDSAGTYDY

SEQ ID NO: 261 - protein, 5 aa, Artificial Sequence
  Description of Artificial Sequence: Synthetic peptide
DYAMG

SEQ ID NO: 262 - protein, 17 aa, Artificial Sequence
  Description of Artificial Sequence: Synthetic peptide
AITWNGGSTYYADSVKG

SEQ ID NO: 263 - protein, 13 aa, Artificial Sequence
  Description of Artificial Sequence: Synthetic peptide
DPLNSDSAGTYDY

SEQ ID NO: 264 - protein, 7 aa, Artificial Sequence
  Description of Artificial Sequence: Synthetic peptide
GRTFSDY

SEQ ID NO: 265 - protein, 6 aa, Artificial Sequence
  Description of Artificial Sequence: Synthetic peptide
TWNGGS

SEQ ID NO: 266 - protein, 12 aa, Artificial Sequence
  Description of Artificial Sequence: Synthetic peptide
DPLNSDSAGTYD

SEQ ID NO: 267 - protein, 8 aa, Artificial Sequence
  Description of Artificial Sequence: Synthetic peptide
GRTFSDYA

SEQ ID NO: 268 - protein, 8 aa, Artificial Sequence
  Description of Artificial Sequence: Synthetic peptide
ITWNGGST

SEQ ID NO: 269 - protein, 15 aa, Artificial Sequence
  Description of Artificial Sequence: Synthetic peptide
AADPLNSDSAGTYDY

SEQ ID NO: 270 - protein, 6 aa, Artificial Sequence
  Description of Artificial Sequence: Synthetic peptide
SDYAMG

SEQ ID NO: 271 - protein, 13 aa, Artificial Sequence
  Description of Artificial Sequence: Synthetic peptide
LVAAITWNGGSTY

SEQ ID NO: 272 - protein, 14 aa, Artificial Sequence
  Description of Artificial Sequence: Synthetic peptide
AADPLNSDSAGTYD

SEQ ID NO: 273 - protein, 10 aa, Artificial Sequence
  Description of Artificial Sequence: Synthetic peptide
GRTIYGYVMG

SEQ ID NO: 274 - protein, 10 aa, Artificial Sequence
  Description of Artificial Sequence: Synthetic peptide
RIDWSGSSTD

SEQ ID NO: 275 - protein, 15 aa, Artificial Sequence
  Description of Artificial Sequence: Synthetic peptide
SAYYSGYVTHRDFGS

SEQ ID NO: 276 - protein, 5 aa, Artificial Sequence
  Description of Artificial Sequence: Synthetic peptide
GYVMG

SEQ ID NO: 277 - protein, 17 aa, Artificial Sequence
  Description of Artificial Sequence: Synthetic peptide
RIDWSGSSTDYADSVKG

SEQ ID NO: 278 - protein, 15 aa, Artificial Sequence
  Description of Artificial Sequence: Synthetic peptide
SAYYSGYVTHRDFGS

SEQ ID NO: 279 - protein, 7 aa, Artificial Sequence
  Description of Artificial Sequence: Synthetic peptide
GRTIYGY

SEQ ID NO: 280 - protein, 6 aa, Artificial Sequence
  Description of Artificial Sequence: Synthetic peptide
DWSGSS

SEQ ID NO: 281 - protein, 14 aa, Artificial Sequence
  Description of Artificial Sequence: Synthetic peptide
SAYYSGYVTHRDFG

SEQ ID NO: 282 - protein, 8 aa, Artificial Sequence
  Description of Artificial Sequence: Synthetic peptide
GRTIYGYV

SEQ ID NO: 283 - protein, 8 aa, Artificial Sequence
  Description of Artificial Sequence: Synthetic peptide
IDWSGSST

SEQ ID NO: 284 - protein, 17 aa, Artificial Sequence
  Description of Artificial Sequence: Synthetic peptide
AGSAYYSGYVTHRDFGS

SEQ ID NO: 285 - protein, 6 aa, Artificial Sequence
  Description of Artificial Sequence: Synthetic peptide
YGYVMG

SEQ ID NO: 286 - protein, 13 aa, Artificial Sequence
  Description of Artificial Sequence: Synthetic peptide
FVARIDWSGSSTD

SEQ ID NO: 287 - protein, 16 aa, Artificial Sequence
  Description of Artificial Sequence: Synthetic peptide
AGSAYYSGYVTHRDFG

SEQ ID NO: 288 - protein, 10 aa, Artificial Sequence
  Description of Artificial Sequence: Synthetic peptide
GRTLRSYIVG

SEQ ID NO: 289 - protein, 10 aa, Artificial Sequence
  Description of Artificial Sequence: Synthetic peptide
AVTWSDGRRV

SEQ ID NO: 290 - protein, 14 aa, Artificial Sequence
  Description of Artificial Sequence: Synthetic peptide
SRGGAYEYSRAYEY

SEQ ID NO: 291 - protein, 5 aa, Artificial Sequence
  Description of Artificial Sequence: Synthetic peptide
SYIVG

SEQ ID NO: 292 - protein, 17 aa, Artificial Sequence
  Description of Artificial Sequence: Synthetic peptide
AVTWSDGRRVTADPVKG

SEQ ID NO: 293 - protein, 14 aa, Artificial Sequence
  Description of Artificial Sequence: Synthetic peptide
SRGGAYEYSRAYEY

SEQ ID NO: 294 - protein, 7 aa, Artificial Sequence
  Description of Artificial Sequence: Synthetic peptide
GRTLRSY

SEQ ID NO: 295 - protein, 6 aa, Artificial Sequence
  Description of Artificial Sequence: Synthetic peptide
TWSDGR

SEQ ID NO: 296 - protein, 13 aa, Artificial Sequence
  Description of Artificial Sequence: Synthetic peptide
SRGGAYEYSRAYE

SEQ ID NO: 297 - protein, 8 aa, Artificial Sequence
  Description of Artificial Sequence: Synthetic peptide
GRTLRSYI

SEQ ID NO: 298 - protein, 8 aa, Artificial Sequence
  Description of Artificial Sequence: Synthetic peptide
VTWSDGRR

SEQ ID NO: 299 - protein, 16 aa, Artificial Sequence
  Description of Artificial Sequence: Synthetic peptide
AVSRGGAYEYSRAYEY

SEQ ID NO: 300 - protein, 6 aa, Artificial Sequence
  Description of Artificial Sequence: Synthetic peptide
RSYIVG

SEQ ID NO: 301 - protein, 13 aa, Artificial Sequence
  Description of Artificial Sequence: Synthetic peptide
FVAAVTWSDGRRV

SEQ ID NO: 302 - protein, 15 aa, Artificial Sequence
  Description of Artificial Sequence: Synthetic peptide
AVSRGGAYEYSRAYE

SEQ ID NO: 303 - protein, 10 aa, Artificial Sequence
  Description of Artificial Sequence: Synthetic peptide
GRTFSPYAMG

SEQ ID NO: 304 - protein, 12 aa, Artificial Sequence
  Description of Artificial Sequence: Synthetic peptide
AIRWSGATTYKY

SEQ ID NO: 305 - protein, 19 aa, Artificial Sequence
  Description of Artificial Sequence: Synthetic peptide
DRVPKDISIDPRNPKDWDY

SEQ ID NO: 306 - protein, 5 aa, Artificial Sequence
  Description of Artificial Sequence: Synthetic peptide
PYAMG

SEQ ID NO: 307 - protein, 19 aa, Artificial Sequence
  Description of Artificial Sequence: Synthetic peptide
AIRWSGATTYKYVGGSVQG

SEQ ID NO: 308 - protein, 19 aa, Artificial Sequence
  Description of Artificial Sequence: Synthetic peptide
DRVPKDISIDPRNPKDWDY

SEQ ID NO: 309 - protein, 7 aa, Artificial Sequence
  Description of Artificial Sequence: Synthetic peptide
GRTFSPY

SEQ ID NO: 310 - protein, 8 aa, Artificial Sequence
  Description of Artificial Sequence: Synthetic peptide
RWSGATTY

SEQ ID NO: 311 - protein, 18 aa, Artificial Sequence
  Description of Artificial Sequence: Synthetic peptide
DRVPKDISIDPRNPKDWD

SEQ ID NO: 312 - protein, 8 aa, Artificial Sequence
  Description of Artificial Sequence: Synthetic peptide
GRTFSPYA

SEQ ID NO: 313 - protein, 10 aa, Artificial Sequence
  Description of Artificial Sequence: Synthetic peptide
IRWSGATTYK

SEQ ID NO: 314 - protein, 21 aa, Artificial Sequence
  Description of Artificial Sequence: Synthetic peptide
AADRVPKDISIDPRNPKDWDY

SEQ ID NO: 315 - protein, 6 aa, Artificial Sequence
  Description of Artificial Sequence: Synthetic peptide
SPYAMG

SEQ ID NO: 316 - protein, 15 aa, Artificial Sequence
  Description of Artificial Sequence: Synthetic peptide
FVAAIRWSGATTYKY

SEQ ID NO: 317 - protein, 20 aa, Artificial Sequence
  Description of Artificial Sequence: Synthetic peptide
AADRVPKDISIDPRNPKDWD

SEQ ID NO: 318 - protein, 7 aa, Artificial Sequence
  Description of Artificial Sequence: Synthetic peptide
GRSYAMG

SEQ ID NO: 319 - protein, 10 aa, Artificial Sequence
  Description of Artificial Sequence: Synthetic peptide
AISWSGSRTY

SEQ ID NO: 320 - protein, 20 aa, Artificial Sequence
  Description of Artificial Sequence: Synthetic peptide
DPDGTVVASSGWTNSYEYGY

SEQ ID NO: 321 - protein, 4 aa, Artificial Sequence
  Description of Artificial Sequence: Synthetic peptide
YAMG

SEQ ID NO: 322 - protein, 17 aa, Artificial Sequence
  Description of Artificial Sequence: Synthetic peptide
AISWSGSRTYYADAVKG

SEQ ID NO: 323 - protein, 20 aa, Artificial Sequence
  Description of Artificial Sequence: Synthetic peptide
DPDGTVVASSGWTNSYEYGY

SEQ ID NO: 324 - protein, 4 aa, Artificial Sequence
  Description of Artificial Sequence: Synthetic peptide
GRSY

SEQ ID NO: 325 - protein, 6 aa, Artificial Sequence
  Description of Artificial Sequence: Synthetic peptide
SWSGSR

SEQ ID NO: 326 - protein, 19 aa, Artificial Sequence
  Description of Artificial Sequence: Synthetic peptide
DPDGTVVASSGWTNSYEYG

SEQ ID NO: 327 - protein, 5 aa, Artificial Sequence
  Description of Artificial Sequence: Synthetic peptide
GRSYA

SEQ ID NO: 328 - protein, 8 aa, Artificial Sequence
  Description of Artificial Sequence: Synthetic peptide
ISWSGSRT

SEQ ID NO: 329 - protein, 22 aa, Artificial Sequence
  Description of Artificial Sequence: Synthetic peptide
AADPDGTVVASSGWTNSYEYGY

SEQ ID NO: 330 - protein, 4 aa, Artificial Sequence
  Description of Artificial Sequence: Synthetic peptide
YAMG

SEQ ID NO: 331 - protein, 13 aa, Artificial Sequence
  Description of Artificial Sequence: Synthetic peptide
FAAAISWSGSRTY

SEQ ID NO: 332 - protein, 21 aa, Artificial Sequence
  Description of Artificial Sequence: Synthetic peptide
AADPDGTVVASSGWTNSYEYG

SEQ ID NO: 333 - protein, 10 aa, Artificial Sequence
  Description of Artificial Sequence: Synthetic peptide
GLSFSLSRMG

SEQ ID NO: 334 - protein, 12 aa, Artificial Sequence
  Description of Artificial Sequence: Synthetic peptide
TIEWSGRSTYKY

SEQ ID NO: 335 - protein, 16 aa, Artificial Sequence
  Description of Artificial Sequence: Synthetic peptide
NPNNYGDPRTPGAYQY

SEQ ID NO: 336 - protein, 5 aa, Artificial Sequence
  Description of Artificial Sequence: Synthetic peptide
LSRMG

SEQ ID NO: 337 - protein, 19 aa, Artificial Sequence
  Description of Artificial Sequence: Synthetic peptide
TIEWSGRSTYKYYDDSVKG

SEQ ID NO: 338 - protein, 16 aa, Artificial Sequence
  Description of Artificial Sequence: Synthetic peptide
NPNNYGDPRTPGAYQY

SEQ ID NO: 339 - protein, 7 aa, Artificial Sequence
  Description of Artificial Sequence: Synthetic peptide
GLSFSLS

SEQ ID NO: 340 - protein, 8 aa, Artificial Sequence
  Description of Artificial Sequence: Synthetic peptide
EWSGRSTY

SEQ ID NO: 341 - protein, 15 aa, Artificial Sequence
  Description of Artificial Sequence: Synthetic peptide
NPNNYGDPRTPGAYQ

SEQ ID NO: 342 - protein, 8 aa, Artificial Sequence
  Description of Artificial Sequence: Synthetic peptide
GLSFSLSR

SEQ ID NO: 343 - protein, 10 aa, Artificial Sequence
  Description of Artificial Sequence: Synthetic peptide
IEWSGRSTYK

SEQ ID NO: 344 - protein, 18 aa, Artificial Sequence
  Description of Artificial Sequence: Synthetic peptide
AANPNNYGDPRTPGAYQY

SEQ ID NO: 345 - protein, 6 aa, Artificial Sequence
  Description of Artificial Sequence: Synthetic peptide
SLSRMG

SEQ ID NO: 346 - protein, 15 aa, Artificial Sequence
  Description of Artificial Sequence: Synthetic peptide
FVATIEWSGRSTYKY

SEQ ID NO: 347 - protein, 17 aa, Artificial Sequence
  Description of Artificial Sequence: Synthetic peptide
AANPNNYGDPRTPGAYQ

SEQ ID NO: 348 - protein, 10 aa, Artificial Sequence
  Description of Artificial Sequence: Synthetic peptide
GRTLNTYVMG

SEQ ID NO: 349 - protein, 10 aa, Artificial Sequence
  Description of Artificial Sequence: Synthetic peptide
RIDWSGSTTD

SEQ ID NO: 350 - protein, 15 aa, Artificial Sequence
  Description of Artificial Sequence: Synthetic peptide
SAYYSGYVTHRDFGS

SEQ ID NO: 351 - protein, 5 aa, Artificial Sequence
  Description of Artificial Sequence: Synthetic peptide
TYVMG

SEQ ID NO: 352 - protein, 17 aa, Artificial Sequence
  Description of Artificial Sequence: Synthetic peptide
RIDWSGSTTDYADSVKG

SEQ ID NO: 353 - protein, 15 aa, Artificial Sequence
  Description of Artificial Sequence: Synthetic peptide
SAYYSGYVTHRDFGS

SEQ ID NO: 354 - protein, 7 aa, Artificial Sequence
  Description of Artificial Sequence: Synthetic peptide
GRTLNTY

SEQ ID NO: 355 - protein, 6 aa, Artificial Sequence
  Description of Artificial Sequence: Synthetic peptide
DWSGST

SEQ ID NO: 356 - protein, 14 aa, Artificial Sequence
  Description of Artificial Sequence: Synthetic peptide
SAYYSGYVTHRDFG

SEQ ID NO: 357 - protein, 8 aa, Artificial Sequence
  Description of Artificial Sequence: Synthetic peptide
GRTLNTYV

SEQ ID NO: 358 - protein, 8 aa, Artificial Sequence
  Description of Artificial Sequence: Synthetic peptide
IDWSGSTT

SEQ ID NO: 359 - protein, 17 aa, Artificial Sequence
  Description of Artificial Sequence: Synthetic peptide
AGSAYYSGYVTHRDFGS

SEQ ID NO: 360 - protein, 6 aa, Artificial Sequence
  Description of Artificial Sequence: Synthetic peptide
NTYVMG

SEQ ID NO: 361 - protein, 13 aa, Artificial Sequence
  Description of Artificial Sequence: Synthetic peptide
FVARIDWSGSTTD

SEQ ID NO: 362 - protein, 16 aa, Artificial Sequence
  Description of Artificial Sequence: Synthetic peptide
AGSAYYSGYVTHRDFG

SEQ ID NO: 363 - protein, 7 aa, Artificial Sequence
  Description of Artificial Sequence: Synthetic peptide
GRTYAMA

SEQ ID NO: 364 - protein, 10 aa, Artificial Sequence
  Description of Artificial Sequence: Synthetic peptide
GIRGGGGYTY

SEQ ID NO: 365 - protein, 19 aa, Artificial Sequence
  Description of Artificial Sequence: Synthetic peptide
GDSSLTLGTRAYTAEAYEH

SEQ ID NO: 366 - protein, 4 aa, Artificial Sequence
  Description of Artificial Sequence: Synthetic peptide
YAMA

SEQ ID NO: 367 - protein, 17 aa, Artificial Sequence
  Description of Artificial Sequence: Synthetic peptide
GIRGGGGYTYSADSVKG

SEQ ID NO: 368 - protein, 19 aa, Artificial Sequence
  Description of Artificial Sequence: Synthetic peptide
GDSSLTLGTRAYTAEAYEH

SEQ ID NO: 369 - protein, 4 aa, Artificial Sequence
  Description of Artificial Sequence: Synthetic peptide
GRTY

SEQ ID NO: 370 - protein, 6 aa, Artificial Sequence
  Description of Artificial Sequence: Synthetic peptide
RGGGGY

SEQ ID NO: 371 - protein, 18 aa, Artificial Sequence
  Description of Artificial Sequence: Synthetic peptide
GDSSLTLGTRAYTAEAYE

SEQ ID NO: 372 - protein, 5 aa, Artificial Sequence
  Description of Artificial Sequence: Synthetic peptide
GRTYA

SEQ ID NO: 373 - protein, 8 aa, Artificial Sequence
  Description of Artificial Sequence: Synthetic peptide
IRGGGGYT

SEQ ID NO: 374 - protein, 21 aa, Artificial Sequence
  Description of Artificial Sequence: Synthetic peptide
AAGDSSLTLGTRAYTAEAYEH

SEQ ID NO: 375 - protein, 4 aa, Artificial Sequence
  Description of Artificial Sequence: Synthetic peptide
YAMA

SEQ ID NO: 376 - protein, 13 aa, Artificial Sequence
  Description of Artificial Sequence: Synthetic peptide
FVAGIRGGGGYTY

SEQ ID NO: 377 - protein, 20 aa, Artificial Sequence
  Description of Artificial Sequence: Synthetic peptide
AAGDSSLTLGTRAYTAEAYE

SEQ ID NO: 378 - protein, 10 aa, Artificial Sequence
  Description of Artificial Sequence: Synthetic peptide
GRTFSSNPMG

SEQ ID NO: 379 - protein, 10 aa, Artificial Sequence
  Description of Artificial Sequence: Synthetic peptide
AISWSGGGTY

SEQ ID NO: 380 - protein, 18 aa, Artificial Sequence
  Description of Artificial Sequence: Synthetic peptide
RDYSDPISLWVEGREYDY

SEQ ID NO: 381 - protein, 5 aa, Artificial Sequence
  Description of Artificial Sequence: Synthetic peptide
SNPMG

SEQ ID NO: 382 - protein, 17 aa, Artificial Sequence
  Description of Artificial Sequence: Synthetic peptide
AISWSGGGTYYADSVKG

SEQ ID NO: 383 - protein, 18 aa, Artificial Sequence
  Description of Artificial Sequence: Synthetic peptide
RDYSDPISLWVEGREYDY

SEQ ID NO: 384 - protein, 7 aa, Artificial Sequence
  Description of Artificial Sequence: Synthetic peptide
GRTFSSN

SEQ ID NO: 385 - protein, 6 aa, Artificial Sequence
  Description of Artificial Sequence: Synthetic peptide
SWSGGG

SEQ ID NO: 386 - protein, 17 aa, Artificial Sequence
  Description of Artificial Sequence: Synthetic peptide
RDYSDPISLWVEGREYD

SEQ ID NO: 387 - protein, 8 aa, Artificial Sequence
  Description of Artificial Sequence: Synthetic peptide
GRTFSSNP

SEQ ID NO: 388 - protein, 8 aa, Artificial Sequence
  Description of Artificial Sequence: Synthetic peptide
ISWSGGGT

SEQ ID NO: 389 - protein, 20 aa, Artificial Sequence
  Description of Artificial Sequence: Synthetic peptide
ASRDYSDPISLWVEGREYDY

SEQ ID NO: 390 - protein, 6 aa, Artificial Sequence
  Description of Artificial Sequence: Synthetic peptide
SSNPMG

SEQ ID NO: 391 - protein, 13 aa, Artificial Sequence
  Description of Artificial Sequence: Synthetic peptide
FVAAISWSGGGTY

SEQ ID NO: 392 - protein, 19 aa, Artificial Sequence
  Description of Artificial Sequence: Synthetic peptide
ASRDYSDPISLWVEGREYD

SEQ ID NO: 393 - protein, 10 aa, Artificial Sequence
  Description of Artificial Sequence: Synthetic peptide
GRTLTTYGMG

SEQ ID NO: 394 - protein, 12 aa, Artificial Sequence
  Description of Artificial Sequence: Synthetic peptide
TIKWSGSTNYKY

SEQ ID NO: 395 - protein, 15 aa, Artificial Sequence
  Description of Artificial Sequence: Synthetic peptide
GTVLGDPRVLNEYDY

SEQ ID NO: 396 - protein, 5 aa, Artificial Sequence
  Description of Artificial Sequence: Synthetic peptide
TYGMG

SEQ ID NO: 397 - protein, 19 aa, Artificial Sequence
  Description of Artificial Sequence: Synthetic peptide
TIKWSGSTNYKYYADSVKG

SEQ ID NO: 398 - protein, 15 aa, Artificial Sequence
  Description of Artificial Sequence: Synthetic peptide
GTVLGDPRVLNEYDY

SEQ ID NO: 399 - protein, 7 aa, Artificial Sequence
  Description of Artificial Sequence: Synthetic peptide
GRTLTTY

SEQ ID NO: 400 - protein, 8 aa, Artificial Sequence
  Description of Artificial Sequence: Synthetic peptide
KWSGSTNY

SEQ ID NO: 401 - protein, 14 aa, Artificial Sequence
  Description of Artificial Sequence: Synthetic peptide
GTVLGDPRVLNEYD

SEQ ID NO: 402 - protein, 8 aa, Artificial Sequence
  Description of Artificial Sequence: Synthetic peptide
GRTLTTYG

SEQ ID NO: 403 - protein, 10 aa, Artificial Sequence
  Description of Artificial Sequence: Synthetic peptide
IKWSGSTNYK

SEQ ID NO: 404 - protein, 17 aa, Artificial Sequence
  Description of Artificial Sequence: Synthetic peptide
AAGTVLGDPRVLNEYDY

SEQ ID NO: 405 - protein, 6 aa, Artificial Sequence
  Description of Artificial Sequence: Synthetic peptide
TTYGMG

SEQ ID NO: 406 - protein, 15 aa, Artificial Sequence
  Description of Artificial Sequence: Synthetic peptide
FVATIKWSGSTNYKY

SEQ ID NO: 407 - protein, 16 aa, Artificial Sequence
  Description of Artificial Sequence: Synthetic peptide
AAGTVLGDPRVLNEYD

SEQ ID NO: 408 - protein, 10 aa, Artificial Sequence
  Description of Artificial Sequence: Synthetic peptide
GRTFSSYAMG

SEQ ID NO: 409 - protein, 13 aa, Artificial Sequence
  Description of Artificial Sequence: Synthetic peptide
ALRWSNDRTYYKY

SEQ ID NO: 410 - protein, 15 aa, Artificial Sequence
  Description of Artificial Sequence: Synthetic peptide
GNYFSDPRVDKEYNY

SEQ ID NO: 411 - protein, 5 aa, Artificial Sequence
  Description of Artificial Sequence: Synthetic peptide
SYAMG

SEQ ID NO: 412 - protein, 20 aa, Artificial Sequence
  Description of Artificial Sequence: Synthetic peptide
ALRWSNDRTYYKYYADSVKG

SEQ ID NO: 413 - protein, 15 aa, Artificial Sequence
  Description of Artificial Sequence: Synthetic peptide
GNYFSDPRVDKEYNY

SEQ ID NO: 414 - protein, 7 aa, Artificial Sequence
  Description of Artificial Sequence: Synthetic peptide
GRTFSSY

SEQ ID NO: 415 - protein, 9 aa, Artificial Sequence
  Description of Artificial Sequence: Synthetic peptide
RWSNDRTYY

SEQ ID NO: 416 - protein, 14 aa, Artificial Sequence
  Description of Artificial Sequence: Synthetic peptide
GNYFSDPRVDKEYN

SEQ ID NO: 417 - protein, 8 aa, Artificial Sequence
  Description of Artificial Sequence: Synthetic peptide
GRTFSSYA

SEQ ID NO: 418 - protein, 11 aa, Artificial Sequence
  Description of Artificial Sequence: Synthetic peptide
LRWSNDRTYYK

SEQ ID NO: 419 - protein, 17 aa, Artificial Sequence
  Description of Artificial Sequence: Synthetic peptide
AGGNYFSDPRVDKEYNY

SEQ ID NO: 420 - protein, 6 aa, Artificial Sequence
  Description of Artificial Sequence: Synthetic peptide
SSYAMG

SEQ ID NO: 421 - protein, 16 aa, Artificial Sequence
  Description of Artificial Sequence: Synthetic peptide
FVAALRWSNDRTYYKY

SEQ ID NO: 422 - protein, 16 aa, Artificial Sequence
  Description of Artificial Sequence: Synthetic peptide
AGGNYFSDPRVDKEYN

SEQ ID NO: 423 - protein, 10 aa, Artificial Sequence
  Description of Artificial Sequence: Synthetic peptide
GRTVSSVAMG

SEQ ID NO: 424 - protein, 10 aa, Artificial Sequence
  Description of Artificial Sequence: Synthetic peptide
TISWTGGSTY

SEQ ID NO: 425 - protein, 18 aa, Artificial Sequence
  Description of Artificial Sequence: Synthetic peptide
GYPADPIALMTLRYEYDY

SEQ ID NO: 426 - protein, 5 aa, Artificial Sequence
  Description of Artificial Sequence: Synthetic peptide
SVAMG

SEQ ID NO: 427 - protein, 17 aa, Artificial Sequence
  Description of Artificial Sequence: Synthetic peptide
TISWTGGSTYYADSVKG

SEQ ID NO: 428 - protein, 18 aa, Artificial Sequence
  Description of Artificial Sequence: Synthetic peptide
GYPADPIALMTLRYEYDY

SEQ ID NO: 429 - protein, 7 aa, Artificial Sequence
  Description of Artificial Sequence: Synthetic peptide
GRTVSSV

SEQ ID NO: 430 - protein, 6 aa, Artificial Sequence
  Description of Artificial Sequence: Synthetic peptide
SWTGGS

SEQ ID NO: 431 - protein, 17 aa, Artificial Sequence
  Description of Artificial Sequence: Synthetic peptide
GYPADPIALMTLRYEYD

SEQ ID NO: 432 - protein, 8 aa, Artificial Sequence
  Description of Artificial Sequence: Synthetic peptide
GRTVSSVA

SEQ ID NO: 433 - protein, 8 aa, Artificial Sequence
  Description of Artificial Sequence: Synthetic peptide
ISWTGGST

SEQ ID NO: 434 - protein, 20 aa, Artificial Sequence
  Description of Artificial Sequence: Synthetic peptide
AAGYPADPIALMTLRYEYDY

SEQ ID NO: 435 - protein, 6 aa, Artificial Sequence
  Description of Artificial Sequence: Synthetic peptide
SSVAMG

SEQ ID NO: 436 - protein, 13 aa, Artificial Sequence
  Description of Artificial Sequence: Synthetic peptide
FVATISWTGGSTY

SEQ ID NO: 437 - protein, 19 aa, Artificial Sequence
  Description of Artificial Sequence: Synthetic peptide
AAGYPADPIALMTLRYEYD

SEQ ID NO: 438 - protein, 10 aa, Artificial Sequence
  Description of Artificial Sequence: Synthetic peptide
GRTSSIYNMG

SEQ ID NO: 439 - protein, 10 aa, Artificial Sequence
  Description of Artificial Sequence: Synthetic peptide
AIHWGGGRTY

SEQ ID NO: 440 - protein, 22 aa, Artificial Sequence
  Description of Artificial Sequence: Synthetic peptide
RRAPELLDDYKQKPEEIGTYHY

SEQ ID NO: 441 - protein, 5 aa, Artificial Sequence
  Description of Artificial Sequence: Synthetic peptide
IYNMG

SEQ ID NO: 442 - protein, 17 aa, Artificial Sequence
  Description of Artificial Sequence: Synthetic peptide
AIHWGGGRTYYADSVKG

SEQ ID NO: 443 - protein, 22 aa, Artificial Sequence
  Description of Artificial Sequence: Synthetic peptide
RRAPELLDDYKQKPEEIGTYHY

SEQ ID NO: 444 - protein, 7 aa, Artificial Sequence
  Description of Artificial Sequence: Synthetic peptide
GRTSSIY

SEQ ID NO: 445 - protein, 6 aa, Artificial Sequence
  Description of Artificial Sequence: Synthetic peptide
HWGGGR

SEQ ID NO: 446 - protein, 21 aa, Artificial Sequence
  Description of Artificial Sequence: Synthetic peptide
RRAPELLDDYKQKPEEIGTYH

SEQ ID NO: 447 - protein, 8 aa, Artificial Sequence
  Description of Artificial Sequence: Synthetic peptide
GRTSSIYN

SEQ ID NO: 448 - protein, 8 aa, Artificial Sequence
  Description of Artificial Sequence: Synthetic peptide
IHWGGGRT

SEQ ID NO: 449 - protein, 24 aa, Artificial Sequence
  Description of Artificial Sequence: Synthetic peptide
AARRAPELLDDYKQKPEEIGTYHY

SEQ ID NO: 450 - protein, 6 aa, Artificial Sequence
  Description of Artificial Sequence: Synthetic peptide
SIYNMG

SEQ ID NO: 451 - protein, 13 aa, Artificial Sequence
  Description of Artificial Sequence: Synthetic peptide
FVAAIHWGGGRTY

SEQ ID NO: 452 - protein, 23 aa, Artificial Sequence
  Description of Artificial Sequence: Synthetic peptide
AARRAPELLDDYKQKPEEIGTYH

SEQ ID NO: 453 - protein, 10 aa, Artificial Sequence
  Description of Artificial Sequence: Synthetic peptide
GRTFSSGIMG

SEQ ID NO: 454 - protein, 12 aa, Artificial Sequence
  Description of Artificial Sequence: Synthetic peptide
AIEWSGGNTYKY

SEQ ID NO: 455 - protein, 18 aa, Artificial Sequence
  Description of Artificial Sequence: Synthetic peptide
DESPSRYIDLRRPAPYHY

SEQ ID NO: 456 - protein, 5 aa, Artificial Sequence
  Description of Artificial Sequence: Synthetic peptide
SGIMG

SEQ ID NO: 457 - protein, 19 aa, Artificial Sequence
  Description of Artificial Sequence: Synthetic peptide
AIEWSGGNTYKYYAESVKG

SEQ ID NO: 458 - protein, 18 aa, Artificial Sequence
  Description of Artificial Sequence: Synthetic peptide
DESPSRYIDLRRPAPYHY

SEQ ID NO: 459 - protein, 7 aa, Artificial Sequence
  Description of Artificial Sequence: Synthetic peptide
GRTFSSG

SEQ ID NO: 460 - protein, 8 aa, Artificial Sequence
  Description of Artificial Sequence: Synthetic peptide
EWSGGNTY

SEQ ID NO: 461 - protein, 17 aa, Artificial Sequence
  Description of Artificial Sequence: Synthetic peptide
DESPSRYIDLRRPAPYH

SEQ ID NO: 462 - protein, 8 aa, Artificial Sequence
  Description of Artificial Sequence: Synthetic peptide
GRTFSSGI

SEQ ID NO: 463 - protein, 10 aa, Artificial Sequence
  Description of Artificial Sequence: Synthetic peptide
IEWSGGNTYK

SEQ ID NO: 464 - protein, 20 aa, Artificial Sequence
  Description of Artificial Sequence: Synthetic peptide
AADESPSRYIDLRRPAPYHY

SEQ ID NO: 465 - protein, 6 aa, Artificial Sequence
  Description of Artificial Sequence: Synthetic peptide
SSGIMG

SEQ ID NO: 466 - protein, 15 aa, Artificial Sequence
  Description of Artificial Sequence: Synthetic peptide
FVAAIEWSGGNTYKY

SEQ ID NO: 467 - protein, 19 aa, Artificial Sequence
  Description of Artificial Sequence: Synthetic peptide
AADESPSRYIDLRRPAPYH

SEQ ID NO: 468 - protein, 10 aa, Artificial Sequence
  Description of Artificial Sequence: Synthetic peptide
GRTFSSNPMG

SEQ ID NO: 469 - protein, 10 aa, Artificial Sequence
  Description of Artificial Sequence: Synthetic peptide
AISWSGGGTY

SEQ ID NO: 470 - protein, 18 aa, Artificial Sequence
  Description of Artificial Sequence: Synthetic peptide
RDYSDPISLWVEDREYDY

SEQ ID NO: 471 - protein, 5 aa, Artificial Sequence
  Description of Artificial Sequence: Synthetic peptide
SNPMG

SEQ ID NO: 472 - protein, 17 aa, Artificial Sequence
  Description of Artificial Sequence: Synthetic peptide
AISWSGGGTYYADSVKG

SEQ ID NO: 473 - protein, 18 aa, Artificial Sequence
  Description of Artificial Sequence: Synthetic peptide
RDYSDPISLWVEDREYDY

SEQ ID NO: 474 - protein, 7 aa, Artificial Sequence
  Description of Artificial Sequence: Synthetic peptide
GRTFSSN

SEQ ID NO: 475 - protein, 6 aa, Artificial Sequence
  Description of Artificial Sequence: Synthetic peptide
SWSGGG

SEQ ID NO: 476 - protein, 17 aa, Artificial Sequence
  Description of Artificial Sequence: Synthetic peptide
RDYSDPISLWVEDREYD

SEQ ID NO: 477 - protein, 8 aa, Artificial Sequence
  Description of Artificial Sequence: Synthetic peptide
GRTFSSNP

SEQ ID NO: 478 - protein, 8 aa, Artificial Sequence
  Description of Artificial Sequence: Synthetic peptide
ISWSGGGT

SEQ ID NO: 479 - protein, 20 aa, Artificial Sequence
  Description of Artificial Sequence: Synthetic peptide
ASRDYSDPISLWVEDREYDY

SEQ ID NO: 480 - protein, 6 aa, Artificial Sequence
  Description of Artificial Sequence: Synthetic peptide
SSNPMG

SEQ ID NO: 481 - protein, 13 aa, Artificial Sequence
  Description of Artificial Sequence: Synthetic peptide
FVAAISWSGGGTY

SEQ ID NO: 482 - protein, 19 aa, Artificial Sequence
  Description of Artificial Sequence: Synthetic peptide
ASRDYSDPISLWVEDREYD

SEQ ID NO: 483 - protein, 10 aa, Artificial Sequence
  Description of Artificial Sequence: Synthetic peptide
GRTFSSYAMG

SEQ ID NO: 484 - protein, 10 aa, Artificial Sequence
  Description of Artificial Sequence: Synthetic peptide
VISWSGGSTY

SEQ ID NO: 485 - protein, 29 aa, Artificial Sequence
  Description of Artificial Sequence: Synthetic peptide
GEQPGSNRPYIPEQPIEFMPTDYPSWYDY

SEQ ID NO: 486 - protein, 5 aa, Artificial Sequence
  Description of Artificial Sequence: Synthetic peptide
SYAMG

SEQ ID NO: 487 - protein, 17 aa, Artificial Sequence
  Description of Artificial Sequence: Synthetic peptide
VISWSGGSTYYADSVKG

SEQ ID NO: 488 - protein, 29 aa, Artificial Sequence
  Description of Artificial Sequence: Synthetic peptide
GEQPGSNRPYIPEQPIEFMPTDYPSWYDY

SEQ ID NO: 489 - protein, 7 aa, Artificial Sequence
  Description of Artificial Sequence: Synthetic peptide
GRTFSSY

SEQ ID NO: 490 - protein, 6 aa, Artificial Sequence
  Description of Artificial Sequence: Synthetic peptide
SWSGGS

SEQ ID NO: 491 - protein, 28 aa, Artificial Sequence
  Description of Artificial Sequence: Synthetic peptide
GEQPGSNRPYIPEQPIEFMPTDYPSWYD

SEQ ID NO: 492 - protein, 8 aa, Artificial Sequence
  Description of Artificial Sequence: Synthetic peptide
GRTFSSYA

SEQ ID NO: 493 - protein, 8 aa, Artificial Sequence
  Description of Artificial Sequence: Synthetic peptide
ISWSGGST

SEQ ID NO: 494 - protein, 31 aa, Artificial Sequence
  Description of Artificial Sequence: Synthetic polypeptide
ASGEQPGSNRPYIPEQPIEFMPTDYPSWYDY

SEQ ID NO: 495 - protein, 6 aa, Artificial Sequence
  Description of Artificial Sequence: Synthetic peptide
SSYAMG

SEQ ID NO: 496 - protein, 13 aa, Artificial Sequence
  Description of Artificial Sequence: Synthetic peptide
FVAVISWSGGSTY

SEQ ID NO: 497 - protein, 30 aa, Artificial Sequence
  Description of Artificial Sequence: Synthetic polypeptide
ASGEQPGSNRPYIPEQPIEFMPTDYPSWYD

SEQ ID NO: 498 - protein, 10 aa, Artificial Sequence
  Description of Artificial Sequence: Synthetic peptide
GRTFDSYAMG

SEQ ID NO: 499 - protein, 10 aa, Artificial Sequence
  Description of Artificial Sequence: Synthetic peptide
AISWTGGSTD

SEQ ID NO: 500 - protein, 22 aa, Artificial Sequence
  Description of Artificial Sequence: Synthetic peptide
EVVGRDVTTMYRVSGLEYEYDY

SEQ ID NO: 501 - protein, 5 aa, Artificial Sequence
  Description of Artificial Sequence: Synthetic peptide
SYAMG

SEQ ID NO: 502 - protein, 17 aa, Artificial Sequence
  Description of Artificial Sequence: Synthetic peptide
AISWTGGSTDYADSVKG

SEQ ID NO: 503 - protein, 22 aa, Artificial Sequence
  Description of Artificial Sequence: Synthetic peptide
EVVGRDVTTMYRVSGLEYEYDY

SEQ ID NO: 504 - protein, 7 aa, Artificial Sequence
  Description of Artificial Sequence: Synthetic peptide
GRTFDSY

SEQ ID NO: 505 - protein, 6 aa, Artificial Sequence
  Description of Artificial Sequence: Synthetic peptide
SWTGGS

SEQ ID NO: 506 - protein, 21 aa, Artificial Sequence
  Description of Artificial Sequence: Synthetic peptide
EVVGRDVTTMYRVSGLEYEYD

SEQ ID NO: 507 - protein, 8 aa, Artificial Sequence
  Description of Artificial Sequence: Synthetic peptide
GRTFDSYA

SEQ ID NO: 508 - protein, 8 aa, Artificial Sequence
  Description of Artificial Sequence: Synthetic peptide
ISWTGGST

SEQ ID NO: 509 - protein, 24 aa, Artificial Sequence
  Description of Artificial Sequence: Synthetic peptide
AAEVVGRDVTTMYRVSGLEYEYDY

SEQ ID NO: 510 - protein, 6 aa, Artificial Sequence
  Description of Artificial Sequence: Synthetic peptide
DSYAMG

SEQ ID NO: 511 - protein, 13 aa, Artificial Sequence
  Description of Artificial Sequence: Synthetic peptide
FVAAISWTGGSTD

SEQ ID NO: 512 - protein, 23 aa, Artificial Sequence
  Description of Artificial Sequence: Synthetic peptide
AAEVVGRDVTTMYRVSGLEYEYD

SEQ ID NO: 513 - protein, 10 aa, Artificial Sequence
  Description of Artificial Sequence: Synthetic peptide
GRTINTYVMG

SEQ ID NO: 514 - protein, 10 aa, Artificial Sequence
  Description of Artificial Sequence: Synthetic peptide
RIDWSGSSTD

SEQ ID NO: 515 - protein, 15 aa, Artificial Sequence
  Description of Artificial Sequence: Synthetic peptide
SAYYSGYVTHRDFGS

SEQ ID NO: 516 - protein, 5 aa, Artificial Sequence
  Description of Artificial Sequence: Synthetic peptide
TYVMG

SEQ ID NO: 517 - protein, 17 aa, Artificial Sequence
  Description of Artificial Sequence: Synthetic peptide
RIDWSGSSTDYADSAKG

SEQ ID NO: 518 - protein, 15 aa, Artificial Sequence
  Description of Artificial Sequence: Synthetic peptide
SAYYSGYVTHRDFGS

SEQ ID NO: 519 - protein, 7 aa, Artificial Sequence
  Description of Artificial Sequence: Synthetic peptide
GRTINTY

SEQ ID NO: 520 - protein, 6 aa, Artificial Sequence
  Description of Artificial Sequence: Synthetic peptide
DWSGSS

SEQ ID NO: 521 - protein, 14 aa, Artificial Sequence
  Description of Artificial Sequence: Synthetic peptide
SAYYSGYVTHRDFG

SEQ ID NO: 522 - protein, 8 aa, Artificial Sequence
  Description of Artificial Sequence: Synthetic peptide
GRTINTYV

SEQ ID NO: 523 - protein, 8 aa, Artificial Sequence
  Description of Artificial Sequence: Synthetic peptide
IDWSGSST

SEQ ID NO: 524 - protein, 17 aa, Artificial Sequence
  Description of Artificial Sequence: Synthetic peptide
AGSAYYSGYVTHRDFGS

SEQ ID NO: 525 - protein, 6 aa, Artificial Sequence
  Description of Artificial Sequence: Synthetic peptide
NTYVMG

SEQ ID NO: 526 - protein, 13 aa, Artificial Sequence
  Description of Artificial Sequence: Synthetic peptide
FVARIDWSGSSTD

SEQ ID NO: 527 - protein, 16 aa, Artificial Sequence
  Description of Artificial Sequence: Synthetic peptide
AGSAYYSGYVTHRDFG

SEQ ID NO: 528 - protein, 10 aa, Artificial Sequence
  Description of Artificial Sequence: Synthetic peptide
GRTFSVYGMG

SEQ ID NO: 529 - protein, 10 aa, Artificial Sequence
  Description of Artificial Sequence: Synthetic peptide
AISWSDGSTY

SEQ ID NO: 530 - protein, 16 aa, Artificial Sequence
  Description of Artificial Sequence: Synthetic peptide
DLTGWGLDADVSEYDY

SEQ ID NO: 531 - protein, 5 aa, Artificial Sequence
  Description of Artificial Sequence: Synthetic peptide
VYGMG

SEQ ID NO: 532 - protein, 17 aa, Artificial Sequence
  Description of Artificial Sequence: Synthetic peptide
AISWSDGSTYYADSVKG

SEQ ID NO: 533 - protein, 16 aa, Artificial Sequence
  Description of Artificial Sequence: Synthetic peptide
DLTGWGLDADVSEYDY

SEQ ID NO: 534 - protein, 7 aa, Artificial Sequence
  Description of Artificial Sequence: Synthetic peptide
GRTFSVY

SEQ ID NO: 535 - protein, 6 aa, Artificial Sequence
  Description of Artificial Sequence: Synthetic peptide
SWSDGS

SEQ ID NO: 536 - protein, 15 aa, Artificial Sequence
  Description of Artificial Sequence: Synthetic peptide
DLTGWGLDADVSEYD

SEQ ID NO: 537 - protein, 8 aa, Artificial Sequence
  Description of Artificial Sequence: Synthetic peptide
GRTFSVYG

SEQ ID NO: 538 - protein, 8 aa, Artificial Sequence
  Description of Artificial Sequence: Synthetic peptide
ISWSDGST

SEQ ID NO: 539 - protein, 18 aa, Artificial Sequence
  Description of Artificial Sequence: Synthetic peptide
AADLTGWGLDADVSEYDY

SEQ ID NO: 540 - protein, 6 aa, Artificial Sequence
  Description of Artificial Sequence: Synthetic peptide
SVYGMG

SEQ ID NO: 541 - protein, 13 aa, Artificial Sequence
  Description of Artificial Sequence: Synthetic peptide
FVAAISWSDGSTY

SEQ ID NO: 542 - protein, 17 aa, Artificial Sequence
  Description of Artificial Sequence: Synthetic peptide
AADLTGWGLDADVSEYD

SEQ ID NO: 543 - protein, 12 aa, Artificial Sequence
  Description of Artificial Sequence: Synthetic peptide
GRSVGFDTYGMA

SEQ ID NO: 544 - protein, 10 aa, Artificial Sequence
  Description of Artificial Sequence: Synthetic peptide
SIAYNGETTS

SEQ ID NO: 545 - protein, 14 aa, Artificial Sequence
  Description of Artificial Sequence: Synthetic peptide
AQYYLTGTSFPAKF

SEQ ID NO: 546 - protein, 7 aa, Artificial Sequence
  Description of Artificial Sequence: Synthetic peptide
FDTYGMA

SEQ ID NO: 547 - protein, 17 aa, Artificial Sequence
  Description of Artificial Sequence: Synthetic peptide
SIAYNGETTSYADSVQG

SEQ ID NO: 548 - protein, 14 aa, Artificial Sequence
  Description of Artificial Sequence: Synthetic peptide
AQYYLTGTSFPAKF

SEQ ID NO: 549 - protein, 9 aa, Artificial Sequence
  Description of Artificial Sequence: Synthetic peptide
GRSVGFDTY

SEQ ID NO: 550 - protein, 6 aa, Artificial Sequence
  Description of Artificial Sequence: Synthetic peptide
AYNGET

SEQ ID NO: 551 - protein, 13 aa, Artificial Sequence
  Description of Artificial Sequence: Synthetic peptide
AQYYLTGTSFPAK

SEQ ID NO: 552 - protein, 10 aa, Artificial Sequence
  Description of Artificial Sequence: Synthetic peptide
GRSVGFDTYG

SEQ ID NO: 553 - protein, 8 aa, Artificial Sequence
  Description of Artificial Sequence: Synthetic peptide
IAYNGETT

SEQ ID NO: 554 - protein, 16 aa, Artificial Sequence
  Description of Artificial Sequence: Synthetic peptide
AAAQYYLTGTSFPAKF

SEQ ID NO: 555 - protein, 8 aa, Artificial Sequence
  Description of Artificial Sequence: Synthetic peptide
GFDTYGMA

SEQ ID NO: 556 - protein, 13 aa, Artificial Sequence
  Description of Artificial Sequence: Synthetic peptide
FVASIAYNGETTS

SEQ ID NO: 557 - protein, 15 aa, Artificial Sequence
  Description of Artificial Sequence: Synthetic peptide
AAAQYYLTGTSFPAK

SEQ ID NO: 558 - protein, 10 aa, Artificial Sequence
  Description of Artificial Sequence: Synthetic peptide
GRTSSIYGMG

SEQ ID NO: 559 - protein, 10 aa, Artificial Sequence
  Description of Artificial Sequence: Synthetic peptide
AISWSAGRTY

SEQ ID NO: 560 - protein, 22 aa, Artificial Sequence
  Description of Artificial Sequence: Synthetic peptide
RRAPELLSDYTQKPEEIGTYHY

SEQ ID NO: 561 - protein, 5 aa, Artificial Sequence
  Description of Artificial Sequence: Synthetic peptide
IYGMG

SEQ ID NO: 562 - protein, 17 aa, Artificial Sequence
  Description of Artificial Sequence: Synthetic peptide
AISWSAGRTYHADSVKG

SEQ ID NO: 563 - protein, 22 aa, Artificial Sequence
  Description of Artificial Sequence: Synthetic peptide
RRAPELLSDYTQKPEEIGTYHY

SEQ ID NO: 564 - protein, 7 aa, Artificial Sequence
  Description of Artificial Sequence: Synthetic peptide
GRTSSIY

SEQ ID NO: 565 - protein, 6 aa, Artificial Sequence
  Description of Artificial Sequence: Synthetic peptide
SWSAGR

SEQ ID NO: 566 - protein, 21 aa, Artificial Sequence
  Description of Artificial Sequence: Synthetic peptide
RRAPELLSDYTQKPEEIGTYH

SEQ ID NO: 567 - protein, 8 aa, Artificial Sequence
  Description of Artificial Sequence: Synthetic peptide
GRTSSIYG

SEQ ID NO: 568 - protein, 8 aa, Artificial Sequence
  Description of Artificial Sequence: Synthetic peptide
ISWSAGRT

SEQ ID NO: 569 - protein, 24 aa, Artificial Sequence
  Description of Artificial Sequence: Synthetic peptide
AARRAPELLSDYTQKPEEIGTYHY

SEQ ID NO: 570 - protein, 6 aa, Artificial Sequence
  Description of Artificial Sequence: Synthetic peptide
SIYGMG

SEQ ID NO: 571 - protein, 13 aa, Artificial Sequence
  Description of Artificial Sequence: Synthetic peptide
FVAAISWSAGRTY

SEQ ID NO: 572 - protein, 23 aa, Artificial Sequence
  Description of Artificial Sequence: Synthetic peptide
AARRAPELLSDYTQKPEEIGTYH

SEQ ID NO: 573 - protein, 10 aa, Artificial Sequence
  Description of Artificial Sequence: Synthetic peptide
GRAANAYAVG

SEQ ID NO: 574 - protein, 10 aa, Artificial Sequence
  Description of Artificial Sequence: Synthetic peptide
HIRWNGGRTA

SEQ ID NO: 575 - protein, 18 aa, Artificial Sequence
  Description of Artificial Sequence: Synthetic peptide
DTNPDAFGDLRLPSEYEY

SEQ ID NO: 576 - protein, 5 aa, Artificial Sequence
  Description of Artificial Sequence: Synthetic peptide
AYAVG

SEQ ID NO: 577 - protein, 17 aa, Artificial Sequence
  Description of Artificial Sequence: Synthetic peptide
HIRWNGGRTAYADSVKG

SEQ ID NO: 578 - protein, 18 aa, Artificial Sequence
  Description of Artificial Sequence: Synthetic peptide
DTNPDAFGDLRLPSEYEY

SEQ ID NO: 579 - protein, 7 aa, Artificial Sequence
  Description of Artificial Sequence: Synthetic peptide
GRAANAY

SEQ ID NO: 580 - protein, 6 aa, Artificial Sequence
  Description of Artificial Sequence: Synthetic peptide
RWNGGR

SEQ ID NO: 581 - protein, 17 aa, Artificial Sequence
  Description of Artificial Sequence: Synthetic peptide
DTNPDAFGDLRLPSEYE

SEQ ID NO: 582 - protein, 8 aa, Artificial Sequence
  Description of Artificial Sequence: Synthetic peptide
GRAANAYA

SEQ ID NO: 583 - protein, 8 aa, Artificial Sequence
  Description of Artificial Sequence: Synthetic peptide
IRWNGGRT

SEQ ID NO: 584 - protein, 20 aa, Artificial Sequence
  Description of Artificial Sequence: Synthetic peptide
AEDTNPDAFGDLRLPSEYEY

SEQ ID NO: 585 - protein, 6 aa, Artificial Sequence
  Description of Artificial Sequence: Synthetic peptide
NAYAVG

SEQ ID NO: 586 - protein, 13 aa, Artificial Sequence
  Description of Artificial Sequence: Synthetic peptide
FVAHIRWNGGRTA

SEQ ID NO: 587 - protein, 19 aa, Artificial Sequence
  Description of Artificial Sequence: Synthetic peptide
AEDTNPDAFGDLRLPSEYE

SEQ ID NO: 588 - protein, 12 aa, Artificial Sequence
  Description of Artificial Sequence: Synthetic peptide
GRALSFNTYAMA

SEQ ID NO: 589 - protein, 10 aa, Artificial Sequence
  Description of Artificial Sequence: Synthetic peptide
SITYNGGSTY

SEQ ID NO: 590 - protein, 14 aa, Artificial Sequence
  Description of Artificial Sequence: Synthetic peptide
AQYWRSGTSFPANY

SEQ ID NO: 591 - protein, 7 aa, Artificial Sequence
  Description of Artificial Sequence: Synthetic peptide
FNTYAMA

SEQ ID NO: 592 - protein, 17 aa, Artificial Sequence
  Description of Artificial Sequence: Synthetic peptide
SITYNGGSTYYADSVKG

SEQ ID NO: 593 - protein, 14 aa, Artificial Sequence
  Description of Artificial Sequence: Synthetic peptide
AQYWRSGTSFPANY

SEQ ID NO: 594 - protein, 9 aa, Artificial Sequence
  Description of Artificial Sequence: Synthetic peptide
GRALSFNTY

SEQ ID NO: 595 - protein, 6 aa, Artificial Sequence
  Description of Artificial Sequence: Synthetic peptide
TYNGGS

SEQ ID NO: 596 - protein, 13 aa, Artificial Sequence
  Description of Artificial Sequence: Synthetic peptide
AQYWRSGTSFPAN

SEQ ID NO: 597 - protein, 10 aa, Artificial Sequence
  Description of Artificial Sequence: Synthetic peptide
GRALSFNTYA

SEQ ID NO: 598 - protein, 8 aa, Artificial Sequence
  Description of Artificial Sequence: Synthetic peptide
ITYNGGST

SEQ ID NO: 599 - protein, 16 aa, Artificial Sequence
  Description of Artificial Sequence: Synthetic peptide
ASAQYWRSGTSFPANY

SEQ ID NO: 600 - protein, 8 aa, Artificial Sequence
  Description of Artificial Sequence: Synthetic peptide
SFNTYAMA

SEQ ID NO: 601 - protein, 13 aa, Artificial Sequence
  Description of Artificial Sequence: Synthetic peptide
FVASITYNGGSTY

SEQ ID NO: 602 - protein, 15 aa, Artificial Sequence
  Description of Artificial Sequence: Synthetic peptide
ASAQYWRSGTSFPAN

SEQ ID NO: 603 - protein, 10 aa, Artificial Sequence
  Description of Artificial Sequence: Synthetic peptide
GDTFSNYAMG

SEQ ID NO: 604 - protein, 10 aa, Artificial Sequence
  Description of Artificial Sequence: Synthetic peptide
DISWYGANIG

SEQ ID NO: 605 - protein, 11 aa, Artificial Sequence
  Description of Artificial Sequence: Synthetic peptide
DRNHWPVKGDY

SEQ ID NO: 606 - protein, 5 aa, Artificial Sequence
  Description of Artificial Sequence: Synthetic peptide
NYAMG

SEQ ID NO: 607 - protein, 17 aa, Artificial Sequence
  Description of Artificial Sequence: Synthetic peptide
DISWYGANIGYADSVKG

SEQ ID NO: 608 - protein, 11 aa, Artificial Sequence
  Description of Artificial Sequence: Synthetic peptide
DRNHWPVKGDY

SEQ ID NO: 609 - protein, 7 aa, Artificial Sequence
  Description of Artificial Sequence: Synthetic peptide
GDTFSNY

SEQ ID NO: 610 - protein, 6 aa, Artificial Sequence
  Description of Artificial Sequence: Synthetic peptide
SWYGAN

SEQ ID NO: 611 - protein, 10 aa, Artificial Sequence
  Description of Artificial Sequence: Synthetic peptide
DRNHWPVKGD

SEQ ID NO: 612 - protein, 8 aa, Artificial Sequence
  Description of Artificial Sequence: Synthetic peptide
GDTFSNYA

SEQ ID NO: 613 - protein, 8 aa, Artificial Sequence
  Description of Artificial Sequence: Synthetic peptide
ISWYGANI

SEQ ID NO: 614 - protein, 13 aa, Artificial Sequence
  Description of Artificial Sequence: Synthetic peptide
AADRNHWPVKGDY

SEQ ID NO: 615 - protein, 6 aa, Artificial Sequence
  Description of Artificial Sequence: Synthetic peptide
SNYAMG

SEQ ID NO: 616 - protein, 13 aa, Artificial Sequence
  Description of Artificial Sequence: Synthetic peptide
FVADISWYGANIG

SEQ ID NO: 617 - protein, 12 aa, Artificial Sequence
  Description of Artificial Sequence: Synthetic peptide
AADRNHWPVKGD

SEQ ID NO: 618 - protein, 10 aa, Artificial Sequence
  Description of Artificial Sequence: Synthetic peptide
GRTRTTYGMG

SEQ ID NO: 619 - protein, 12 aa, Artificial Sequence
  Description of Artificial Sequence: Synthetic peptide
TITWSGSTNYKY

SEQ ID NO: 620 - protein, 15 aa, Artificial Sequence
  Description of Artificial Sequence: Synthetic peptide
STVLTDPRVPTEYDY

SEQ ID NO: 621 - protein, 5 aa, Artificial Sequence
  Description of Artificial Sequence: Synthetic peptide
TYGMG

SEQ ID NO: 622 - protein, 19 aa, Artificial Sequence
  Description of Artificial Sequence: Synthetic peptide
TITWSGSTNYKYYADSVKG

SEQ ID NO: 623 - protein, 15 aa, Artificial Sequence
  Description of Artificial Sequence: Synthetic peptide
STVLTDPRVPTEYDY

SEQ ID NO: 624 - protein, 7 aa, Artificial Sequence
  Description of Artificial Sequence: Synthetic peptide
GRTRTTY

SEQ ID NO: 625 - protein, 8 aa, Artificial Sequence
  Description of Artificial Sequence: Synthetic peptide
TWSGSTNY

SEQ ID NO: 626 - protein, 14 aa, Artificial Sequence
  Description of Artificial Sequence: Synthetic peptide
STVLTDPRVPTEYD

SEQ ID NO: 627 - protein, 8 aa, Artificial Sequence
  Description of Artificial Sequence: Synthetic peptide
GRTRTTYG

SEQ ID NO: 628 - protein, 10 aa, Artificial Sequence
  Description of Artificial Sequence: Synthetic peptide
ITWSGSTNYK

SEQ ID NO: 629 - protein, 17 aa, Artificial Sequence
  Description of Artificial Sequence: Synthetic peptide
AASTVLTDPRVPTEYDY

SEQ ID NO: 630 - protein, 6 aa, Artificial Sequence
  Description of Artificial Sequence: Synthetic peptide
TTYGMG

SEQ ID NO: 631 - protein, 15 aa, Artificial Sequence
  Description of Artificial Sequence: Synthetic peptide
FVTTITWSGSTNYKY

SEQ ID NO: 632 - protein, 16 aa, Artificial Sequence
  Description of Artificial Sequence: Synthetic peptide
AASTVLTDPRVPTEYD

SEQ ID NO: 633 - protein, 10 aa, Artificial Sequence
  Description of Artificial Sequence: Synthetic peptide
GRTINTYVMG

SEQ ID NO: 634 - protein, 10 aa, Artificial Sequence
  Description of Artificial Sequence: Synthetic peptide
RIDWSGSSTD

SEQ ID NO: 635 - protein, 15 aa, Artificial Sequence
  Description of Artificial Sequence: Synthetic peptide
SAYYSGYVTHRDFGS

SEQ ID NO: 636 - protein, 5 aa, Artificial Sequence
  Description of Artificial Sequence: Synthetic peptide
TYVMG

SEQ ID NO: 637 - protein, 17 aa, Artificial Sequence
  Description of Artificial Sequence: Synthetic peptide
RIDWSGSSTDYADSVKG

SEQ ID NO: 638 - protein, 15 aa, Artificial Sequence
  Description of Artificial Sequence: Synthetic peptide
SAYYSGYVTHRDFGS

SEQ ID NO: 639 - protein, 7 aa, Artificial Sequence
  Description of Artificial Sequence: Synthetic peptide
GRTINTY

SEQ ID NO: 640 - protein, 6 aa, Artificial Sequence
  Description of Artificial Sequence: Synthetic peptide
DWSGSS

SEQ ID NO: 641 - protein, 14 aa, Artificial Sequence
  Description of Artificial Sequence: Synthetic peptide
SAYYSGYVTHRDFG

SEQ ID NO: 642 - protein, 8 aa, Artificial Sequence
  Description of Artificial Sequence: Synthetic peptide
GRTINTYV

SEQ ID NO: 643 - protein, 8 aa, Artificial Sequence
  Description of Artificial Sequence: Synthetic peptide
IDWSGSST

SEQ ID NO: 644 - protein, 17 aa, Artificial Sequence
  Description of Artificial Sequence: Synthetic peptide
AGSAYYSGYVTHRDFGS

SEQ ID NO: 645 - protein, 6 aa, Artificial Sequence
  Description of Artificial Sequence: Synthetic peptide
NTYVMG

SEQ ID NO: 646 - protein, 13 aa, Artificial Sequence
  Description of Artificial Sequence: Synthetic peptide
FVARIDWSGSSTD

SEQ ID NO: 647 - protein, 16 aa, Artificial Sequence
  Description of Artificial Sequence: Synthetic peptide
AGSAYYSGYVTHRDFG

SEQ ID NO: 648 - protein, 10 aa, Artificial Sequence
  Description of Artificial Sequence: Synthetic peptide
GFTFRTYYMG

SEQ ID NO: 649 - protein, 10 aa, Artificial Sequence
  Description of Artificial Sequence: Synthetic peptide
VTRSSDDVTY

SEQ ID NO: 650 - protein, 19 aa, Artificial Sequence
  Description of Artificial Sequence: Synthetic peptide
KPVPITRYSFPQIGEEYDY

SEQ ID NO: 651 - protein, 5 aa, Artificial Sequence
  Description of Artificial Sequence: Synthetic peptide
TYYMG

SEQ ID NO: 652 - protein, 17 aa, Artificial Sequence
  Description of Artificial Sequence: Synthetic peptide
VTRSSDDVTYYADSVKG

SEQ ID NO: 653 - protein, 19 aa, Artificial Sequence
  Description of Artificial Sequence: Synthetic peptide
KPVPITRYSFPQIGEEYDY

SEQ ID NO: 654 - protein, 7 aa, Artificial Sequence
  Description of Artificial Sequence: Synthetic peptide
GFTFRTY

SEQ ID NO: 655 - protein, 6 aa, Artificial Sequence
  Description of Artificial Sequence: Synthetic peptide
RSSDDV

SEQ ID NO: 656 - protein, 18 aa, Artificial Sequence
  Description of Artificial Sequence: Synthetic peptide
KPVPITRYSFPQIGEEYD

SEQ ID NO: 657 - protein, 8 aa, Artificial Sequence
  Description of Artificial Sequence: Synthetic peptide
GFTFRTYY

SEQ ID NO: 658 - protein, 8 aa, Artificial Sequence
  Description of Artificial Sequence: Synthetic peptide
TRSSDDVT

SEQ ID NO: 659 - protein, 21 aa, Artificial Sequence
  Description of Artificial Sequence: Synthetic peptide
AAKPVPITRYSFPQIGEEYDY

SEQ ID NO: 660 - protein, 6 aa, Artificial Sequence
  Description of Artificial Sequence: Synthetic peptide
RTYYMG

SEQ ID NO: 661 - protein, 13 aa, Artificial Sequence
  Description of Artificial Sequence: Synthetic peptide
FVGVTRSSDDVTY

SEQ ID NO: 662 - protein, 20 aa, Artificial Sequence
  Description of Artificial Sequence: Synthetic peptide
AAKPVPITRYSFPQIGEEYD

SEQ ID NO: 663 - protein, 10 aa, Artificial Sequence
  Description of Artificial Sequence: Synthetic peptide
GRTVSSYYMG

SEQ ID NO: 664 - protein, 12 aa, Artificial Sequence
  Description of Artificial Sequence: Synthetic peptide
AISWVGSSTYKY

SEQ ID NO: 665 - protein, 15 aa, Artificial Sequence
  Description of Artificial Sequence: Synthetic peptide
RPRVGDPRSRYDDDN

SEQ ID NO: 666 - protein, 5 aa, Artificial Sequence
  Description of Artificial Sequence: Synthetic peptide
SYYMG

SEQ ID NO: 667 - protein, 19 aa, Artificial Sequence
  Description of Artificial Sequence: Synthetic peptide
AISWVGSSTYKYYTDSAKG

SEQ ID NO: 668 - protein, 15 aa, Artificial Sequence
  Description of Artificial Sequence: Synthetic peptide
RPRVGDPRSRYDDDN

SEQ ID NO: 669 - protein, 7 aa, Artificial Sequence
  Description of Artificial Sequence: Synthetic peptide
GRTVSSY

SEQ ID NO: 670 - protein, 8 aa, Artificial Sequence
  Description of Artificial Sequence: Synthetic peptide
SWVGSSTY

SEQ ID NO: 671 - protein, 14 aa, Artificial Sequence
  Description of Artificial Sequence: Synthetic peptide
RPRVGDPRSRYDDD

SEQ ID NO: 672 - protein, 8 aa, Artificial Sequence
  Description of Artificial Sequence: Synthetic peptide
GRTVSSYY

SEQ ID NO: 673 - protein, 10 aa, Artificial Sequence
  Description of Artificial Sequence: Synthetic peptide
ISWVGSSTYK

SEQ ID NO: 674 - protein, 17 aa, Artificial Sequence
  Description of Artificial Sequence: Synthetic peptide
AARPRVGDPRSRYDDDN

SEQ ID NO: 675 - protein, 6 aa, Artificial Sequence
  Description of Artificial Sequence: Synthetic peptide
SSYYMG

SEQ ID NO: 676 - protein, 15 aa, Artificial Sequence
  Description of Artificial Sequence: Synthetic peptide
FVAAISWVGSSTYKY

SEQ ID NO: 677 - protein, 16 aa, Artificial Sequence
  Description of Artificial Sequence: Synthetic peptide
AARPRVGDPRSRYDDD

SEQ ID NO: 678 - protein, 12 aa, Artificial Sequence
  Description of Artificial Sequence: Synthetic peptide
GRTLSFDTYAMG

SEQ ID NO: 679 - protein, 10 aa, Artificial Sequence
  Description of Artificial Sequence: Synthetic peptide
SIDWSGGTTY

SEQ ID NO: 680 - protein, 14 aa, Artificial Sequence
  Description of Artificial Sequence: Synthetic peptide
AQYYRSGTSFPANY

SEQ ID NO: 681 - protein, 7 aa, Artificial Sequence
  Description of Artificial Sequence: Synthetic peptide
FDTYAMG

SEQ ID NO: 682 - protein, 17 aa, Artificial Sequence
  Description of Artificial Sequence: Synthetic peptide
SIDWSGGTTYYADSVKG

SEQ ID NO: 683 - protein, 14 aa, Artificial Sequence
  Description of Artificial Sequence: Synthetic peptide
AQYYRSGTSFPANY

SEQ ID NO: 684 - protein, 9 aa, Artificial Sequence
  Description of Artificial Sequence: Synthetic peptide
GRTLSFDTY

SEQ ID NO: 685 - protein, 6 aa, Artificial Sequence
  Description of Artificial Sequence: Synthetic peptide
DWSGGT

SEQ ID NO: 686 - protein, 13 aa, Artificial Sequence
  Description of Artificial Sequence: Synthetic peptide
AQYYRSGTSFPAN

SEQ ID NO: 687 - protein, 10 aa, Artificial Sequence
  Description of Artificial Sequence: Synthetic peptide
GRTLSFDTYA

SEQ ID NO: 688 - protein, 8 aa, Artificial Sequence
  Description of Artificial Sequence: Synthetic peptide
IDWSGGTT

SEQ ID NO: 689 - protein, 16 aa, Artificial Sequence
  Description of Artificial Sequence: Synthetic peptide
AAAQYYRSGTSFPANY

SEQ ID NO: 690 - protein, 8 aa, Artificial Sequence
  Description of Artificial Sequence: Synthetic peptide
SFDTYAMG

SEQ ID NO: 691 - protein, 13 aa, Artificial Sequence
  Description of Artificial Sequence: Synthetic peptide
FVASIDWSGGTTY

SEQ ID NO: 692 - protein, 15 aa, Artificial Sequence
  Description of Artificial Sequence: Synthetic peptide
AAAQYYRSGTSFPAN

SEQ ID NO: 693 - protein, 10 aa, Artificial Sequence
  Description of Artificial Sequence: Synthetic peptide
GLTRSDYAMG

SEQ ID NO: 694 - protein, 12 aa, Artificial Sequence
  Description of Artificial Sequence: Synthetic peptide
TLKWSEGSRFMY

SEQ ID NO: 695 - protein, 15 aa, Artificial Sequence
  Description of Artificial Sequence: Synthetic peptide
GFNVGFVRRASEYNF

SEQ ID NO: 696 - protein, 5 aa, Artificial Sequence
  Description of Artificial Sequence: Synthetic peptide
DYAMG

SEQ ID NO: 697 - protein, 19 aa, Artificial Sequence
  Description of Artificial Sequence: Synthetic peptide
TLKWSEGSRFMYRAEDVKG

SEQ ID NO: 698 - protein, 15 aa, Artificial Sequence
  Description of Artificial Sequence: Synthetic peptide
GFNVGFVRRASEYNF

SEQ ID NO: 699 - protein, 7 aa, Artificial Sequence
  Description of Artificial Sequence: Synthetic peptide
GLTRSDY

SEQ ID NO: 700 - protein, 8 aa, Artificial Sequence
  Description of Artificial Sequence: Synthetic peptide
KWSEGSRF

SEQ ID NO: 701 - protein, 14 aa, Artificial Sequence
  Description of Artificial Sequence: Synthetic peptide
GFNVGFVRRASEYN

SEQ ID NO: 702 - protein, 8 aa, Artificial Sequence
  Description of Artificial Sequence: Synthetic peptide
GLTRSDYA

SEQ ID NO: 703 - protein, 10 aa, Artificial Sequence
  Description of Artificial Sequence: Synthetic peptide
LKWSEGSRFM

SEQ ID NO: 704 - protein, 17 aa, Artificial Sequence
  Description of Artificial Sequence: Synthetic peptide
AAGFNVGFVRRASEYNF

SEQ ID NO: 705 - protein, 6 aa, Artificial Sequence
  Description of Artificial Sequence: Synthetic peptide
SDYAMG

SEQ ID NO: 706 - protein, 15 aa, Artificial Sequence
  Description of Artificial Sequence: Synthetic peptide
FVATLKWSEGSRFMY

SEQ ID NO: 707 - protein, 16 aa, Artificial Sequence
  Description of Artificial Sequence: Synthetic peptide
AAGFNVGFVRRASEYN

SEQ ID NO: 708 - protein, 10 aa, Artificial Sequence
  Description of Artificial Sequence: Synthetic peptide
GLSFSSYTMG

SEQ ID NO: 709 - protein, 10 aa, Artificial Sequence
  Description of Artificial Sequence: Synthetic peptide
AIHWSGGPTF

SEQ ID NO: 710 - protein, 13 aa, Artificial Sequence
  Description of Artificial Sequence: Synthetic peptide
EPVGSMISPDWTY

SEQ ID NO: 711 - protein, 5 aa, Artificial Sequence
  Description of Artificial Sequence: Synthetic peptide
SYTMG

SEQ ID NO: 712 - protein, 17 aa, Artificial Sequence
  Description of Artificial Sequence: Synthetic peptide
AIHWSGGPTFYSNSVKG

SEQ ID NO: 713 - protein, 13 aa, Artificial Sequence
  Description of Artificial Sequence: Synthetic peptide
EPVGSMISPDWTY

SEQ ID NO: 714 - protein, 7 aa, Artificial Sequence
  Description of Artificial Sequence: Synthetic peptide
GLSFSSY

SEQ ID NO: 715 - protein, 6 aa, Artificial Sequence
  Description of Artificial Sequence: Synthetic peptide
HWSGGP

SEQ ID NO: 716 - protein, 12 aa, Artificial Sequence
  Description of Artificial Sequence: Synthetic peptide
EPVGSMISPDWT

SEQ ID NO: 717 - protein, 8 aa, Artificial Sequence
  Description of Artificial Sequence: Synthetic peptide
GLSFSSYT

SEQ ID NO: 718 - protein, 8 aa, Artificial Sequence
  Description of Artificial Sequence: Synthetic peptide
IHWSGGPT

SEQ ID NO: 719 - protein, 15 aa, Artificial Sequence
  Description of Artificial Sequence: Synthetic peptide
TAEPVGSMISPDWTY

SEQ ID NO: 720 - protein, 6 aa, Artificial Sequence
  Description of Artificial Sequence: Synthetic peptide
SSYTMG

SEQ ID NO: 721 - protein, 13 aa, Artificial Sequence
  Description of Artificial Sequence: Synthetic peptide
LISAIHWSGGPTF

SEQ ID NO: 722 - protein, 14 aa, Artificial Sequence
  Description of Artificial Sequence: Synthetic peptide
TAEPVGSMISPDWT

SEQ ID NO: 723 - protein, 10 aa, Artificial Sequence
  Description of Artificial Sequence: Synthetic peptide
GFTFRTYYMG

SEQ ID NO: 724 - protein, 10 aa, Artificial Sequence
  Description of Artificial Sequence: Synthetic peptide
VTRSSDDVTY

SEQ ID NO: 725 - protein, 19 aa, Artificial Sequence
  Description of Artificial Sequence: Synthetic peptide
KPVPITRYSFPQIGEEYDY

SEQ ID NO: 726 - protein, 5 aa, Artificial Sequence
  Description of Artificial Sequence: Synthetic peptide
TYYMG

SEQ ID NO: 727 - protein, 17 aa, Artificial Sequence
  Description of Artificial Sequence: Synthetic peptide
VTRSSDDVTYYADSVKG

SEQ ID NO: 728 - protein, 19 aa, Artificial Sequence
  Description of Artificial Sequence: Synthetic peptide
KPVPITRYSFPQIGEEYDY

SEQ ID NO: 729 - protein, 7 aa, Artificial Sequence
  Description of Artificial Sequence: Synthetic peptide
GFTFRTY

SEQ ID NO: 730 - protein, 6 aa, Artificial Sequence
  Description of Artificial Sequence: Synthetic peptide
RSSDDV

SEQ ID NO: 731 - protein, 18 aa, Artificial Sequence
  Description of Artificial Sequence: Synthetic peptide
KPVPITRYSFPQIGEEYD

SEQ ID NO: 732 - protein, 8 aa, Artificial Sequence
  Description of Artificial Sequence: Synthetic peptide
GFTFRTYY

SEQ ID NO: 733 - protein, 8 aa, Artificial Sequence
  Description of Artificial Sequence: Synthetic peptide
TRSSDDVT

SEQ ID NO: 734 - protein, 21 aa, Artificial Sequence
  Description of Artificial Sequence: Synthetic peptide
AAKPVPITRYSFPQIGEEYDY

SEQ ID NO: 735 - protein, 6 aa, Artificial Sequence
  Description of Artificial Sequence: Synthetic peptide
RTYYMG

SEQ ID NO: 736 - protein, 13 aa, Artificial Sequence
  Description of Artificial Sequence: Synthetic peptide
FVGVTRSSDDVTY

SEQ ID NO: 737 - protein, 20 aa, Artificial Sequence
  Description of Artificial Sequence: Synthetic peptide
AAKPVPITRYSFPQIGEEYD

SEQ ID NO: 738 - protein, 12 aa, Artificial Sequence
  Description of Artificial Sequence: Synthetic peptide
GRSLSFDTYAMS

SEQ ID NO: 739 - protein, 10 aa, Artificial Sequence
  Description of Artificial Sequence: Synthetic peptide
SIDWNGGSTS

SEQ ID NO: 740 - protein, 14 aa, Artificial Sequence
  Description of Artificial Sequence: Synthetic peptide
ARYYIGGTYFPANY

SEQ ID NO: 741 - protein, 7 aa, Artificial Sequence
  Description of Artificial Sequence: Synthetic peptide
FDTYAMS

SEQ ID NO: 742 - protein, 17 aa, Artificial Sequence
  Description of Artificial Sequence: Synthetic peptide
SIDWNGGSTSYADSMKG

SEQ ID NO: 743 - protein, 14 aa, Artificial Sequence
  Description of Artificial Sequence: Synthetic peptide
ARYYIGGTYFPANY

SEQ ID NO: 744 - protein, 9 aa, Artificial Sequence
  Description of Artificial Sequence: Synthetic peptide
GRSLSFDTY

SEQ ID NO: 745 - protein, 6 aa, Artificial Sequence
  Description of Artificial Sequence: Synthetic peptide
DWNGGS

SEQ ID NO: 746 - protein, 13 aa, Artificial Sequence
  Description of Artificial Sequence: Synthetic peptide
ARYYIGGTYFPAN

SEQ ID NO: 747 - protein, 10 aa, Artificial Sequence
  Description of Artificial Sequence: Synthetic peptide
GRSLSFDTYA

SEQ ID NO: 748 - protein, 8 aa, Artificial Sequence
  Description of Artificial Sequence: Synthetic peptide
IDWNGGST

SEQ ID NO: 749 - protein, 16 aa, Artificial Sequence
  Description of Artificial Sequence: Synthetic peptide
ASARYYIGGTYFPANY

SEQ ID NO: 750 - protein, 8 aa, Artificial Sequence
  Description of Artificial Sequence: Synthetic peptide
SFDTYAMS

SEQ ID NO: 751 - protein, 13 aa, Artificial Sequence
  Description of Artificial Sequence: Synthetic peptide
FVASIDWNGGSTS

SEQ ID NO: 752 - protein, 15 aa, Artificial Sequence
  Description of Artificial Sequence: Synthetic peptide
ASARYYIGGTYFPAN

SEQ ID NO: 753 - protein, 10 aa, Artificial Sequence
  Description of Artificial Sequence: Synthetic peptide
GRAFSTYAMG

SEQ ID NO: 754 - protein, 10 aa, Artificial Sequence
  Description of Artificial Sequence: Synthetic peptide
GIAWSGYSTD

SEQ ID NO: 755 - protein, 16 aa, Artificial Sequence
  Description of Artificial Sequence: Synthetic peptide
ERNFGRVGVKEVEYDY

SEQ ID NO: 756 - protein, 5 aa, Artificial Sequence
  Description of Artificial Sequence: Synthetic peptide
TYAMG

SEQ ID NO: 757 - protein, 17 aa, Artificial Sequence
  Description of Artificial Sequence: Synthetic peptide
GIAWSGYSTDYADSVKG

SEQ ID NO: 758 - protein, 16 aa, Artificial Sequence
  Description of Artificial Sequence: Synthetic peptide
ERNFGRVGVKEVEYDY

SEQ ID NO: 759 - protein, 7 aa, Artificial Sequence
  Description of Artificial Sequence: Synthetic peptide
GRAFSTY

SEQ ID NO: 760 - protein, 6 aa, Artificial Sequence
  Description of Artificial Sequence: Synthetic peptide
AWSGYS

SEQ ID NO: 761 - protein, 15 aa, Artificial Sequence
  Description of Artificial Sequence: Synthetic peptide
ERNFGRVGVKEVEYD

SEQ ID NO: 762 - protein, 8 aa, Artificial Sequence
  Description of Artificial Sequence: Synthetic peptide
GRAFSTYA

SEQ ID NO: 763 - protein, 8 aa, Artificial Sequence
  Description of Artificial Sequence: Synthetic peptide
IAWSGYST

SEQ ID NO: 764 - protein, 18 aa, Artificial Sequence
  Description of Artificial Sequence: Synthetic peptide
AGERNFGRVGVKEVEYDY

SEQ ID NO: 765 - protein, 6 aa, Artificial Sequence
  Description of Artificial Sequence: Synthetic peptide
STYAMG

SEQ ID NO: 766 - protein, 13 aa, Artificial Sequence
  Description of Artificial Sequence: Synthetic peptide
FVAGIAWSGYSTD

SEQ ID NO: 767 - protein, 17 aa, Artificial Sequence
  Description of Artificial Sequence: Synthetic peptide
AGERNFGRVGVKEVEYD

SEQ ID NO: 768 - protein, 10 aa, Artificial Sequence
  Description of Artificial Sequence: Synthetic peptide
GSIFSIRDMA

SEQ ID NO: 769 - protein, 9 aa, Artificial Sequence
  Description of Artificial Sequence: Synthetic peptide
IAARGGSTH

SEQ ID NO: 770 - protein, 13 aa, Artificial Sequence
  Description of Artificial Sequence: Synthetic peptide
EVATMIQPGFRDY

SEQ ID NO: 771 - protein, 5 aa, Artificial Sequence
  Description of Artificial Sequence: Synthetic peptide
IRDMA

SEQ ID NO: 772 - protein, 16 aa, Artificial Sequence
  Description of Artificial Sequence: Synthetic peptide
IAARGGSTHYADSVKG

SEQ ID NO: 773 - protein, 13 aa, Artificial Sequence
  Description of Artificial Sequence: Synthetic peptide
EVATMIQPGFRDY

SEQ ID NO: 774 - protein, 7 aa, Artificial Sequence
  Description of Artificial Sequence: Synthetic peptide
GSIFSIR

SEQ ID NO: 775 - protein, 5 aa, Artificial Sequence
  Description of Artificial Sequence: Synthetic peptide
ARGGS

SEQ ID NO: 776 - protein, 12 aa, Artificial Sequence
  Description of Artificial Sequence: Synthetic peptide
EVATMIQPGFRD

SEQ ID NO: 777 - protein, 8 aa, Artificial Sequence
  Description of Artificial Sequence: Synthetic peptide
GSIFSIRD

SEQ ID NO: 778 - protein, 7 aa, Artificial Sequence
  Description of Artificial Sequence: Synthetic peptide
AARGGST

SEQ ID NO: 779 - protein, 15 aa, Artificial Sequence
  Description of Artificial Sequence: Synthetic peptide
NAEVATMIQPGFRDY

SEQ ID NO: 780 - protein, 6 aa, Artificial Sequence
  Description of Artificial Sequence: Synthetic peptide
SIRDMA

SEQ ID NO: 781 - protein, 12 aa, Artificial Sequence
  Description of Artificial Sequence: Synthetic peptide
WVAIAARGGSTH

SEQ ID NO: 782 - protein, 14 aa, Artificial Sequence
  Description of Artificial Sequence: Synthetic peptide
NAEVATMIQPGFRD

SEQ ID NO: 783 - protein, 10 aa, Artificial Sequence
  Description of Artificial Sequence: Synthetic peptide
GLPFSSSRMG

SEQ ID NO: 784 - protein, 12 aa, Artificial Sequence
  Description of Artificial Sequence: Synthetic peptide
AIGWSGRSTYRY

SEQ ID NO: 785 - protein, 16 aa, Artificial Sequence
  Description of Artificial Sequence: Synthetic peptide
DPDYYGDYRTSGAWRY

SEQ ID NO: 786 - protein, 5 aa, Artificial Sequence
  Description of Artificial Sequence: Synthetic peptide
SSRMG

SEQ ID NO: 787 - protein, 19 aa, Artificial Sequence
  Description of Artificial Sequence: Synthetic peptide
AIGWSGRSTYRYYGDSVKG

SEQ ID NO: 788 - protein, 16 aa, Artificial Sequence
  Description of Artificial Sequence: Synthetic peptide
DPDYYGDYRTSGAWRY

SEQ ID NO: 789 - protein, 7 aa, Artificial Sequence
  Description of Artificial Sequence: Synthetic peptide
GLPFSSS

SEQ ID NO: 790 - protein, 8 aa, Artificial Sequence
  Description of Artificial Sequence: Synthetic peptide
GWSGRSTY

SEQ ID NO: 791 - protein, 15 aa, Artificial Sequence
  Description of Artificial Sequence: Synthetic peptide
DPDYYGDYRTSGAWR

SEQ ID NO: 792 - protein, 8 aa, Artificial Sequence
  Description of Artificial Sequence: Synthetic peptide
GLPFSSSR

SEQ ID NO: 793 - protein, 10 aa, Artificial Sequence
  Description of Artificial Sequence: Synthetic peptide
IGWSGRSTYR

SEQ ID NO: 794 - protein, 18 aa, Artificial Sequence
  Description of Artificial Sequence: Synthetic peptide
AADPDYYGDYRTSGAWRY

SEQ ID NO: 795 - protein, 6 aa, Artificial Sequence
  Description of Artificial Sequence: Synthetic peptide
SSSRMG

SEQ ID NO: 796 - protein, 15 aa, Artificial Sequence
  Description of Artificial Sequence: Synthetic peptide
FVAAIGWSGRSTYRY

SEQ ID NO: 797 - protein, 17 aa, Artificial Sequence
  Description of Artificial Sequence: Synthetic peptide
AADPDYYGDYRTSGAWR

SEQ ID NO: 798 - protein, 10 aa, Artificial Sequence
  Description of Artificial Sequence: Synthetic peptide
GRTFPTYAMG

SEQ ID NO: 799 - protein, 12 aa, Artificial Sequence
  Description of Artificial Sequence: Synthetic peptide
TIRWSGSTQYKY

SEQ ID NO: 800 - protein, 15 aa, Artificial Sequence
  Description of Artificial Sequence: Synthetic peptide
TTLLTDPRALNAYAY

SEQ ID NO: 801 - protein, 5 aa, Artificial Sequence
  Description of Artificial Sequence: Synthetic peptide
TYAMG

SEQ ID NO: 802 - protein, 19 aa, Artificial Sequence
  Description of Artificial Sequence: Synthetic peptide
TIRWSGSTQYKYYADFVKG

SEQ ID NO: 803 - protein, 15 aa, Artificial Sequence
  Description of Artificial Sequence: Synthetic peptide
TTLLTDPRALNAYAY

SEQ ID NO: 804 - protein, 7 aa, Artificial Sequence
  Description of Artificial Sequence: Synthetic peptide
GRTFPTY

SEQ ID NO: 805 - protein, 8 aa, Artificial Sequence
  Description of Artificial Sequence: Synthetic peptide
RWSGSTQY

SEQ ID NO: 806 - protein, 14 aa, Artificial Sequence
  Description of Artificial Sequence: Synthetic peptide
TTLLTDPRALNAYA

SEQ ID NO: 807 - protein, 8 aa, Artificial Sequence
  Description of Artificial Sequence: Synthetic peptide
GRTFPTYA

SEQ ID NO: 808 - protein, 10 aa, Artificial Sequence
  Description of Artificial Sequence: Synthetic peptide
IRWSGSTQYK

SEQ ID NO: 809 - protein, 17 aa, Artificial Sequence
  Description of Artificial Sequence: Synthetic peptide
AATTLLTDPRALNAYAY

SEQ ID NO: 810 - protein, 6 aa, Artificial Sequence
  Description of Artificial Sequence: Synthetic peptide
PTYAMG

SEQ ID NO: 811 - protein, 15 aa, Artificial Sequence
  Description of Artificial Sequence: Synthetic peptide
FVATIRWSGSTQYKY

SEQ ID NO: 812 - protein, 16 aa, Artificial Sequence
  Description of Artificial Sequence: Synthetic peptide
AATTLLTDPRALNAYA

SEQ ID NO: 813 - protein, 10 aa, Artificial Sequence
  Description of Artificial Sequence: Synthetic peptide
GRTFSVYAMG

SEQ ID NO: 814 - protein, 10 aa, Artificial Sequence
  Description of Artificial Sequence: Synthetic peptide
AITWSGGSTS

SEQ ID NO: 815 - protein, 19 aa, Artificial Sequence
  Description of Artificial Sequence: Synthetic peptide
ATNPYFSDYYPDLKYEFDY

SEQ ID NO: 816 - protein, 5 aa, Artificial Sequence
  Description of Artificial Sequence: Synthetic peptide
VYAMG

SEQ ID NO: 817 - protein, 17 aa, Artificial Sequence
  Description of Artificial Sequence: Synthetic peptide
AITWSGGSTSYADSVKG

SEQ ID NO: 818 - protein, 19 aa, Artificial Sequence
  Description of Artificial Sequence: Synthetic peptide
ATNPYFSDYYPDLKYEFDY

SEQ ID NO: 819 - protein, 7 aa, Artificial Sequence
  Description of Artificial Sequence: Synthetic peptide
GRTFSVY

SEQ ID NO: 820 - protein, 6 aa, Artificial Sequence
  Description of Artificial Sequence: Synthetic peptide
TWSGGS

SEQ ID NO: 821 - protein, 18 aa, Artificial Sequence
  Description of Artificial Sequence: Synthetic peptide
ATNPYFSDYYPDLKYEFD

SEQ ID NO: 822 - protein, 8 aa, Artificial Sequence
  Description of Artificial Sequence: Synthetic peptide
GRTFSVYA

SEQ ID NO: 823 - protein, 8 aa, Artificial Sequence
  Description of Artificial Sequence: Synthetic peptide
ITWSGGST

SEQ ID NO: 824 - protein, 21 aa, Artificial Sequence
  Description of Artificial Sequence: Synthetic peptide
AAATNPYFSDYYPDLKYEFDY

SEQ ID NO: 825 - protein, 6 aa, Artificial Sequence
  Description of Artificial Sequence: Synthetic peptide
SVYAMG

SEQ ID NO: 826 - protein, 13 aa, Artificial Sequence
  Description of Artificial Sequence: Synthetic peptide
FVAAITWSGGSTS

SEQ ID NO: 827 - protein, 20 aa, Artificial Sequence
  Description of Artificial Sequence: Synthetic peptide
AAATNPYFSDYYPDLKYEFD

SEQ ID NO: 828 - protein, 10 aa, Artificial Sequence
  Description of Artificial Sequence: Synthetic peptide
GRTINGYVMG

SEQ ID NO: 829 - protein, 10 aa, Artificial Sequence
  Description of Artificial Sequence: Synthetic peptide
RIDWSGSSTD

SEQ ID NO: 830 - protein, 15 aa, Artificial Sequence
  Description of Artificial Sequence: Synthetic peptide
SAYYSGYVTHRDFGS

SEQ ID NO: 831 - protein, 5 aa, Artificial Sequence
  Description of Artificial Sequence: Synthetic peptide
GYVMG

SEQ ID NO: 832 - protein, 17 aa, Artificial Sequence
  Description of Artificial Sequence: Synthetic peptide
RIDWSGSSTDYADSVKG

SEQ ID NO: 833 - protein, 15 aa, Artificial Sequence
  Description of Artificial Sequence: Synthetic peptide
SAYYSGYVTHRDFGS

SEQ ID NO: 834 - protein, 7 aa, Artificial Sequence
  Description of Artificial Sequence: Synthetic peptide
GRTINGY

SEQ ID NO: 835 - protein, 6 aa, Artificial Sequence
  Description of Artificial Sequence: Synthetic peptide
DWSGSS

SEQ ID NO: 836 - protein, 14 aa, Artificial Sequence
  Description of Artificial Sequence: Synthetic peptide
SAYYSGYVTHRDFG

SEQ ID NO: 837 - protein, 8 aa, Artificial Sequence
  Description of Artificial Sequence: Synthetic peptide
GRTINGYV

SEQ ID NO: 838 - protein, 8 aa, Artificial Sequence
  Description of Artificial Sequence: Synthetic peptide
IDWSGSST

SEQ ID NO: 839 - protein, 17 aa, Artificial Sequence
  Description of Artificial Sequence: Synthetic peptide
AGSAYYSGYVTHRDFGS

SEQ ID NO: 840 - protein, 6 aa, Artificial Sequence
  Description of Artificial Sequence: Synthetic peptide
NGYVMG

SEQ ID NO: 841 - protein, 13 aa, Artificial Sequence
  Description of Artificial Sequence: Synthetic peptide
FVARIDWSGSSTD

SEQ ID NO: 842 - protein, 16 aa, Artificial Sequence
  Description of Artificial Sequence: Synthetic peptide
AGSAYYSGYVTHRDFG

SEQ ID NO: 843 - protein, 10 aa, Artificial Sequence
  Description of Artificial Sequence: Synthetic peptide
GFTFSSFTMT

SEQ ID NO: 844 - protein, 10 aa, Artificial Sequence
  Description of Artificial Sequence: Synthetic peptide
RISSDGTGTN

SEQ ID NO: 845 - protein, 6 aa, Artificial Sequence
  Description of Artificial Sequence: Synthetic peptide
ADDSST

SEQ ID NO: 846 - protein, 5 aa, Artificial Sequence
  Description of Artificial Sequence: Synthetic peptide
SFTMT

SEQ ID NO: 847 - protein, 17 aa, Artificial Sequence
  Description of Artificial Sequence: Synthetic peptide
RISSDGTGTNYADSVKG

SEQ ID NO: 848 - protein, 6 aa, Artificial Sequence
  Description of Artificial Sequence: Synthetic peptide
ADDSST

SEQ ID NO: 849 - protein, 7 aa, Artificial Sequence
  Description of Artificial Sequence: Synthetic peptide
GFTFSSF

SEQ ID NO: 850 - protein, 6 aa, Artificial Sequence
  Description of Artificial Sequence: Synthetic peptide
SSDGTG

SEQ ID NO: 851 - protein, 5 aa, Artificial Sequence
  Description of Artificial Sequence: Synthetic peptide
ADDSS

SEQ ID NO: 852 - protein, 8 aa, Artificial Sequence
  Description of Artificial Sequence: Synthetic peptide
GFTFSSFT

SEQ ID NO: 853 - protein, 8 aa, Artificial Sequence
  Description of Artificial Sequence: Synthetic peptide
ISSDGTGT

SEQ ID NO: 854 - protein, 8 aa, Artificial Sequence
  Description of Artificial Sequence: Synthetic peptide
AIADDSST

SEQ ID NO: 855 - protein, 6 aa, Artificial Sequence
  Description of Artificial Sequence: Synthetic peptide
SSFTMT

SEQ ID NO: 856 - protein, 13 aa, Artificial Sequence
  Description of Artificial Sequence: Synthetic peptide
WVSRISSDGTGTN

SEQ ID NO: 857 - protein, 7 aa, Artificial Sequence
  Description of Artificial Sequence: Synthetic peptide
AIADDSS

SEQ ID NO: 858 - protein, 10 aa, Artificial Sequence
  Description of Artificial Sequence: Synthetic peptide
GRTFSVYRVG

SEQ ID NO: 859 - protein, 12 aa, Artificial Sequence
  Description of Artificial Sequence: Synthetic peptide
AVIWSGASTYKY

SEQ ID NO: 860 - protein, 18 aa, Artificial Sequence
  Description of Artificial Sequence: Synthetic peptide
DPLGLPGPDVRVEGGYRH

SEQ ID NO: 861 - protein, 5 aa, Artificial Sequence
  Description of Artificial Sequence: Synthetic peptide
VYRVG

SEQ ID NO: 862 - protein, 19 aa, Artificial Sequence
  Description of Artificial Sequence: Synthetic peptide
AVIWSGASTYKYAADSVKG

SEQ ID NO: 863 - protein, 18 aa, Artificial Sequence
  Description of Artificial Sequence: Synthetic peptide
DPLGLPGPDVRVEGGYRH

SEQ ID NO: 864 - protein, 7 aa, Artificial Sequence
  Description of Artificial Sequence: Synthetic peptide
GRTFSVY

SEQ ID NO: 865 - protein, 8 aa, Artificial Sequence
  Description of Artificial Sequence: Synthetic peptide
IWSGASTY

SEQ ID NO: 866 - protein, 17 aa, Artificial Sequence
  Description of Artificial Sequence: Synthetic peptide
DPLGLPGPDVRVEGGYR

SEQ ID NO: 867 - protein, 8 aa, Artificial Sequence
  Description of Artificial Sequence: Synthetic peptide
GRTFSVYR

SEQ ID NO: 868 - protein, 10 aa, Artificial Sequence
  Description of Artificial Sequence: Synthetic peptide
VIWSGASTYK

SEQ ID NO: 869 - protein, 20 aa, Artificial Sequence
  Description of Artificial Sequence: Synthetic peptide
AADPLGLPGPDVRVEGGYRH

SEQ ID NO: 870 - protein, 6 aa, Artificial Sequence
  Description of Artificial Sequence: Synthetic peptide
SVYRVG

SEQ ID NO: 871 - protein, 15 aa, Artificial Sequence
  Description of Artificial Sequence: Synthetic peptide
FVAAVIWSGASTYKY

SEQ ID NO: 872 - protein, 19 aa, Artificial Sequence
  Description of Artificial Sequence: Synthetic peptide
AADPLGLPGPDVRVEGGYR

SEQ ID NO: 873 - protein, 10 aa, Artificial Sequence
  Description of Artificial Sequence: Synthetic peptide
GRTVTVMTVG

SEQ ID NO: 874 - protein, 10 aa, Artificial Sequence
  Description of Artificial Sequence: Synthetic peptide
AITMYGERTY

SEQ ID NO: 875 - protein, 16 aa, Artificial Sequence
  Description of Artificial Sequence: Synthetic peptide
RTYVSGIYDRFDDYNY

SEQ ID NO: 876 - protein, 5 aa, Artificial Sequence
  Description of Artificial Sequence: Synthetic peptide
VMTVG

SEQ ID NO: 877 - protein, 17 aa, Artificial Sequence
  Description of Artificial Sequence: Synthetic peptide
AITMYGERTYYADSVKG

SEQ ID NO: 878 - protein, 16 aa, Artificial Sequence
  Description of Artificial Sequence: Synthetic peptide
RTYVSGIYDRFDDYNY

SEQ ID NO: 879 - protein, 7 aa, Artificial Sequence
  Description of Artificial Sequence: Synthetic peptide
GRTVTVM

SEQ ID NO: 880 - protein, 6 aa, Artificial Sequence
  Description of Artificial Sequence: Synthetic peptide
TMYGER

SEQ ID NO: 881 - protein, 15 aa, Artificial Sequence
  Description of Artificial Sequence: Synthetic peptide
RTYVSGIYDRFDDYN

SEQ ID NO: 882 - protein, 8 aa, Artificial Sequence
  Description of Artificial Sequence: Synthetic peptide
GRTVTVMT

SEQ ID NO: 883 - protein, 8 aa, Artificial Sequence
  Description of Artificial Sequence: Synthetic peptide
ITMYGERT

SEQ ID NO: 884 - protein, 18 aa, Artificial Sequence
  Description of Artificial Sequence: Synthetic peptide
AARTYVSGIYDRFDDYNY

SEQ ID NO: 885 - protein, 6 aa, Artificial Sequence
  Description of Artificial Sequence: Synthetic peptide
TVMTVG

SEQ ID NO: 886 - protein, 13 aa, Artificial Sequence
  Description of Artificial Sequence: Synthetic peptide
FVAAITMYGERTY

SEQ ID NO: 887 - protein, 17 aa, Artificial Sequence
  Description of Artificial Sequence: Synthetic peptide
AARTYVSGIYDRFDDYN

SEQ ID NO: 888 - protein, 12 aa, Artificial Sequence
  Description of Artificial Sequence: Synthetic peptide
GRALSFNTYAMA

SEQ ID NO: 889 - protein, 10 aa, Artificial Sequence
  Description of Artificial Sequence: Synthetic peptide
SITYNGGSTY

SEQ ID NO: 890 - protein, 14 aa, Artificial Sequence
  Description of Artificial Sequence: Synthetic peptide
AQYWRSGTSFPANY

SEQ ID NO: 891 - protein, 7 aa, Artificial Sequence
  Description of Artificial Sequence: Synthetic peptide
FNTYAMA

SEQ ID NO: 892 - protein, 17 aa, Artificial Sequence
  Description of Artificial Sequence: Synthetic peptide
SITYNGGSTYYADSVKG

SEQ ID NO: 893 - protein, 14 aa, Artificial Sequence
  Description of Artificial Sequence: Synthetic peptide
AQYWRSGTSFPANY

SEQ ID NO: 894 - protein, 9 aa, Artificial Sequence
  Description of Artificial Sequence: Synthetic peptide
GRALSFNTY

SEQ ID NO: 895 - protein, 6 aa, Artificial Sequence
  Description of Artificial Sequence: Synthetic peptide
TYNGGS

SEQ ID NO: 896 - protein, 13 aa, Artificial Sequence
  Description of Artificial Sequence: Synthetic peptide
AQYWRSGTSFPAN

SEQ ID NO: 897 - protein, 10 aa, Artificial Sequence
  Description of Artificial Sequence: Synthetic peptide
GRALSFNTYA

SEQ ID NO: 898 - protein, 8 aa, Artificial Sequence
  Description of Artificial Sequence: Synthetic peptide
ITYNGGST

SEQ ID NO: 899 - protein, 16 aa, Artificial Sequence
  Description of Artificial Sequence: Synthetic peptide
ASAQYWRSGTSFPANY

SEQ ID NO: 900 - protein, 8 aa, Artificial Sequence
  Description of Artificial Sequence: Synthetic peptide
SFNTYAMA

SEQ ID NO: 901 - protein, 13 aa, Artificial Sequence
  Description of Artificial Sequence: Synthetic peptide
FVASITYNGGSTY

SEQ ID NO: 902 - protein, 15 aa, Artificial Sequence
  Description of Artificial Sequence: Synthetic peptide
ASAQYWRSGTSFPAN

SEQ ID NO: 903 - protein, 10 aa, Artificial Sequence
  Description of Artificial Sequence: Synthetic peptide
GRTFTTYVMG

SEQ ID NO: 904 - protein, 12 aa, Artificial Sequence
  Description of Artificial Sequence: Synthetic peptide
TIAWSGSTNYKY

SEQ ID NO: 905 - protein, 15 aa, Artificial Sequence
  Description of Artificial Sequence: Synthetic peptide
STVLTDPRRLNEYAN

SEQ ID NO: 906 - protein, 5 aa, Artificial Sequence
  Description of Artificial Sequence: Synthetic peptide
TYVMG

SEQ ID NO: 907 - protein, 19 aa, Artificial Sequence
  Description of Artificial Sequence: Synthetic peptide
TIAWSGSTNYKYYADSVKG

SEQ ID NO: 908 - protein, 15 aa, Artificial Sequence
  Description of Artificial Sequence: Synthetic peptide
STVLTDPRRLNEYAN

SEQ ID NO: 909 - protein, 7 aa, Artificial Sequence
  Description of Artificial Sequence: Synthetic peptide
GRTFTTY

SEQ ID NO: 910 - protein, 8 aa, Artificial Sequence
  Description of Artificial Sequence: Synthetic peptide
AWSGSTNY

SEQ ID NO: 911 - protein, 14 aa, Artificial Sequence
  Description of Artificial Sequence: Synthetic peptide
STVLTDPRRLNEYA

SEQ ID NO: 912 - protein, 8 aa, Artificial Sequence
  Description of Artificial Sequence: Synthetic peptide
GRTFTTYV

SEQ ID NO: 913 - protein, 10 aa, Artificial Sequence
  Description of Artificial Sequence: Synthetic peptide
IAWSGSTNYK

SEQ ID NO: 914 - protein, 17 aa, Artificial Sequence
  Description of Artificial Sequence: Synthetic peptide
AASTVLTDPRRLNEYAN

SEQ ID NO: 915 - protein, 6 aa, Artificial Sequence
  Description of Artificial Sequence: Synthetic peptide
TTYVMG

SEQ ID NO: 916 - protein, 15 aa, Artificial Sequence
  Description of Artificial Sequence: Synthetic peptide
FVATIAWSGSTNYKY

SEQ ID NO: 917 - protein, 16 aa, Artificial Sequence
  Description of Artificial Sequence: Synthetic peptide
AASTVLTDPRRLNEYA

SEQ ID NO: 918 - protein, 10 aa, Artificial Sequence
  Description of Artificial Sequence: Synthetic peptide
GRTFSNYAMG

SEQ ID NO: 919 - protein, 10 aa, Artificial Sequence
  Description of Artificial Sequence: Synthetic peptide
GISRSGGSTY

SEQ ID NO: 920 - protein, 13 aa, Artificial Sequence
  Description of Artificial Sequence: Synthetic peptide
DGLDYALGFRGDY

SEQ ID NO: 921 - protein, 5 aa, Artificial Sequence
  Description of Artificial Sequence: Synthetic peptide
NYAMG

SEQ ID NO: 922 - protein, 17 aa, Artificial Sequence
  Description of Artificial Sequence: Synthetic peptide
GISRSGGSTYSADSVKG

SEQ ID NO: 923 - protein, 13 aa, Artificial Sequence
  Description of Artificial Sequence: Synthetic peptide
DGLDYALGFRGDY

SEQ ID NO: 924 - protein, 7 aa, Artificial Sequence
  Description of Artificial Sequence: Synthetic peptide
GRTFSNY

SEQ ID NO: 925 - protein, 6 aa, Artificial Sequence
  Description of Artificial Sequence: Synthetic peptide
SRSGGS

SEQ ID NO: 926 - protein, 12 aa, Artificial Sequence
  Description of Artificial Sequence: Synthetic peptide
DGLDYALGFRGD

SEQ ID NO: 927 - protein, 8 aa, Artificial Sequence
  Description of Artificial Sequence: Synthetic peptide
GRTFSNYA

SEQ ID NO: 928 - protein, 8 aa, Artificial Sequence
  Description of Artificial Sequence: Synthetic peptide
ISRSGGST

SEQ ID NO: 929 - protein, 15 aa, Artificial Sequence
  Description of Artificial Sequence: Synthetic peptide
AADGLDYALGFRGDY

SEQ ID NO: 930 - protein, 6 aa, Artificial Sequence
  Description of Artificial Sequence: Synthetic peptide
SNYAMG

SEQ ID NO: 931 - protein, 13 aa, Artificial Sequence
  Description of Artificial Sequence: Synthetic peptide
FVAGISRSGGSTY

SEQ ID NO: 932 - protein, 14 aa, Artificial Sequence
  Description of Artificial Sequence: Synthetic peptide
AADGLDYALGFRGD

SEQ ID NO: 933 - protein, 10 aa, Artificial Sequence
  Description of Artificial Sequence: Synthetic peptide
GRTFGSYSMG

SEQ ID NO: 934 - protein, 12 aa, Artificial Sequence
  Description of Artificial Sequence: Synthetic peptide
AISWSGSSTYKY

SEQ ID NO: 935 - protein, 15 aa, Artificial Sequence
  Description of Artificial Sequence: Synthetic peptide
TMERRDPRRTSAYDY

SEQ ID NO: 936 - protein, 5 aa, Artificial Sequence
  Description of Artificial Sequence: Synthetic peptide
SYSMG

SEQ ID NO: 937 - protein, 19 aa, Artificial Sequence
  Description of Artificial Sequence: Synthetic peptide
AISWSGSSTYKYYEDSVKG

SEQ ID NO: 938 - protein, 15 aa, Artificial Sequence
  Description of Artificial Sequence: Synthetic peptide
TMERRDPRRTSAYDY

SEQ ID NO: 939 - protein, 7 aa, Artificial Sequence
  Description of Artificial Sequence: Synthetic peptide
GRTFGSY

SEQ ID NO: 940 - protein, 8 aa, Artificial Sequence
  Description of Artificial Sequence: Synthetic peptide
SWSGSSTY

SEQ ID NO: 941 - protein, 14 aa, Artificial Sequence
  Description of Artificial Sequence: Synthetic peptide
TMERRDPRRTSAYD

SEQ ID NO: 942 - protein, 8 aa, Artificial Sequence
  Description of Artificial Sequence: Synthetic peptide
GRTFGSYS

SEQ ID NO: 943 - protein, 10 aa, Artificial Sequence
  Description of Artificial Sequence: Synthetic peptide
ISWSGSSTYK

SEQ ID NO: 944 - protein, 17 aa, Artificial Sequence
  Description of Artificial Sequence: Synthetic peptide
GGTMERRDPRRTSAYDY

SEQ ID NO: 945 - protein, 6 aa, Artificial Sequence
  Description of Artificial Sequence: Synthetic peptide
GSYSMG

SEQ ID NO: 946 - protein, 15 aa, Artificial Sequence
  Description of Artificial Sequence: Synthetic peptide
FVGAISWSGSSTYKY

SEQ ID NO: 947 - protein, 16 aa, Artificial Sequence
  Description of Artificial Sequence: Synthetic peptide
GGTMERRDPRRTSAYD

SEQ ID NO: 948 - protein, 10 aa, Artificial Sequence
  Description of Artificial Sequence: Synthetic peptide
GRTFSTYRMG

SEQ ID NO: 949 - protein, 10 aa, Artificial Sequence
  Description of Artificial Sequence: Synthetic peptide
AISWSTGSTY

SEQ ID NO: 950 - protein, 13 aa, Artificial Sequence
  Description of Artificial Sequence: Synthetic peptide
GMVATTRSSAYPY

SEQ ID NO: 951 - protein, 5 aa, Artificial Sequence
  Description of Artificial Sequence: Synthetic peptide
TYRMG

SEQ ID NO: 952 - protein, 17 aa, Artificial Sequence
  Description of Artificial Sequence: Synthetic peptide
AISWSTGSTYYADSVKG

SEQ ID NO: 953 - protein, 13 aa, Artificial Sequence
  Description of Artificial Sequence: Synthetic peptide
GMVATTRSSAYPY

SEQ ID NO: 954 - protein, 7 aa, Artificial Sequence
  Description of Artificial Sequence: Synthetic peptide
GRTFSTY

SEQ ID NO: 955 - protein, 6 aa, Artificial Sequence
  Description of Artificial Sequence: Synthetic peptide
SWSTGS

SEQ ID NO: 956 - protein, 12 aa, Artificial Sequence
  Description of Artificial Sequence: Synthetic peptide
GMVATTRSSAYP

SEQ ID NO: 957 - protein, 8 aa, Artificial Sequence
  Description of Artificial Sequence: Synthetic peptide
GRTFSTYR

SEQ ID NO: 958 - protein, 8 aa, Artificial Sequence
  Description of Artificial Sequence: Synthetic peptide
ISWSTGST

SEQ ID NO: 959 - protein, 15 aa, Artificial Sequence
  Description of Artificial Sequence: Synthetic peptide
AAGMVATTRSSAYPY

SEQ ID NO: 960 - protein, 6 aa, Artificial Sequence
  Description of Artificial Sequence: Synthetic peptide
STYRMG

SEQ ID NO: 961 - protein, 13 aa, Artificial Sequence
  Description of Artificial Sequence: Synthetic peptide
FVAAISWSTGSTY

SEQ ID NO: 962 - protein, 14 aa, Artificial Sequence
  Description of Artificial Sequence: Synthetic peptide
AAGMVATTRSSAYP

SEQ ID NO: 963 - protein, 10 aa, Artificial Sequence
  Description of Artificial Sequence: Synthetic peptide
GRTESTYTMA

SEQ ID NO: 964 - protein, 10 aa, Artificial Sequence
  Description of Artificial Sequence: Synthetic peptide
TISFSGSTTT

SEQ ID NO: 965 - protein, 15 aa, Artificial Sequence
  Description of Artificial Sequence: Synthetic peptide
DTRRRVGSSPRFYDY

SEQ ID NO: 966 - protein, 5 aa, Artificial Sequence
  Description of Artificial Sequence: Synthetic peptide
TYTMA

SEQ ID NO: 967 - protein, 17 aa, Artificial Sequence
  Description of Artificial Sequence: Synthetic peptide
TISFSGSTTTYLASVQG

SEQ ID NO: 968 - protein, 15 aa, Artificial Sequence
  Description of Artificial Sequence: Synthetic peptide
DTRRRVGSSPRFYDY

SEQ ID NO: 969 - protein, 7 aa, Artificial Sequence
  Description of Artificial Sequence: Synthetic peptide
GRTESTY

SEQ ID NO: 970 - protein, 6 aa, Artificial Sequence
  Description of Artificial Sequence: Synthetic peptide
SFSGST

SEQ ID NO: 971 - protein, 14 aa, Artificial Sequence
  Description of Artificial Sequence: Synthetic peptide
DTRRRVGSSPRFYD

SEQ ID NO: 972 - protein, 8 aa, Artificial Sequence
  Description of Artificial Sequence: Synthetic peptide
GRTESTYT

SEQ ID NO: 973 - protein, 8 aa, Artificial Sequence
  Description of Artificial Sequence: Synthetic peptide
ISFSGSTT

SEQ ID NO: 974 - protein, 17 aa, Artificial Sequence
  Description of Artificial Sequence: Synthetic peptide
ALDTRRRVGSSPRFYDY

SEQ ID NO: 975 - protein, 6 aa, Artificial Sequence
  Description of Artificial Sequence: Synthetic peptide
STYTMA

SEQ ID NO: 976 - protein, 13 aa, Artificial Sequence
  Description of Artificial Sequence: Synthetic peptide
RVATISFSGSTTT

SEQ ID NO: 977 - protein, 16 aa, Artificial Sequence
  Description of Artificial Sequence: Synthetic peptide
ALDTRRRVGSSPRFYD

SEQ ID NO: 978 - protein, 10 aa, Artificial Sequence
  Description of Artificial Sequence: Synthetic peptide
GRTFTTYGMG

SEQ ID NO: 979 - protein, 12 aa, Artificial Sequence
  Description of Artificial Sequence: Synthetic peptide
TITWSGSTNYKY

SEQ ID NO: 980 - protein, 15 aa, Artificial Sequence
  Description of Artificial Sequence: Synthetic peptide
STVLRDPRVPTEYDY

SEQ ID NO: 981 - protein, 5 aa, Artificial Sequence
  Description of Artificial Sequence: Synthetic peptide
TYGMG

SEQ ID NO: 982 - protein, 19 aa, Artificial Sequence
  Description of Artificial Sequence: Synthetic peptide
TITWSGSTNYKYYADSVKG

SEQ ID NO: 983 - protein, 15 aa, Artificial Sequence
  Description of Artificial Sequence: Synthetic peptide
STVLRDPRVPTEYDY

SEQ ID NO: 984 - protein, 7 aa, Artificial Sequence
  Description of Artificial Sequence: Synthetic peptide
GRTFTTY

SEQ ID NO: 985 - protein, 8 aa, Artificial Sequence
  Description of Artificial Sequence: Synthetic peptide
TWSGSTNY

SEQ ID NO: 986 - protein, 14 aa, Artificial Sequence
  Description of Artificial Sequence: Synthetic peptide
STVLRDPRVPTEYD

SEQ ID NO: 987 - protein, 8 aa, Artificial Sequence
  Description of Artificial Sequence: Synthetic peptide
GRTFTTYG

SEQ ID NO: 988 - protein, 10 aa, Artificial Sequence
  Description of Artificial Sequence: Synthetic peptide
ITWSGSTNYK

SEQ ID NO: 989 - protein, 17 aa, Artificial Sequence
  Description of Artificial Sequence: Synthetic peptide
AASTVLRDPRVPTEYDY

SEQ ID NO: 990 - protein, 6 aa, Artificial Sequence
  Description of Artificial Sequence: Synthetic peptide
TTYGMG

SEQ ID NO: 991 - protein, 15 aa, Artificial Sequence
  Description of Artificial Sequence: Synthetic peptide
FVTTITWSGSTNYKY

SEQ ID NO: 992 - protein, 16 aa, Artificial Sequence
  Description of Artificial Sequence: Synthetic peptide
AASTVLRDPRVPTEYD

SEQ ID NO: 993 - protein, 12 aa, Artificial Sequence
  Description of Artificial Sequence: Synthetic peptide
GRSLGFDTYGMA

SEQ ID NO: 994 - protein, 10 aa, Artificial Sequence
  Description of Artificial Sequence: Synthetic peptide
SIDWNGGSTY

SEQ ID NO: 995 - protein, 14 aa, Artificial Sequence
  Description of Artificial Sequence: Synthetic peptide
ARYYTSSTYFPANY

SEQ ID NO: 996 - protein, 7 aa, Artificial Sequence
  Description of Artificial Sequence: Synthetic peptide
FDTYGMA

SEQ ID NO: 997 - protein, 17 aa, Artificial Sequence
  Description of Artificial Sequence: Synthetic peptide
SIDWNGGSTYYADSMKG

SEQ ID NO: 998 - protein, 14 aa, Artificial Sequence
  Description of Artificial Sequence: Synthetic peptide
ARYYTSSTYFPANY

SEQ ID NO: 999 - protein, 9 aa, Artificial Sequence
  Description of Artificial Sequence: Synthetic peptide
GRSLGFDTY

SEQ ID NO: 1000 - protein, 6 aa, Artificial Sequence
  Description of Artificial Sequence: Synthetic peptide
DWNGGS

SEQ ID NO: 1001 - protein, 13 aa, Artificial Sequence
  Description of Artificial Sequence: Synthetic peptide
ARYYTSSTYFPAN

SEQ ID NO: 1002 - protein, 10 aa, Artificial Sequence
  Description of Artificial Sequence: Synthetic peptide
GRSLGFDTYG

SEQ ID NO: 1003 - protein, 8 aa, Artificial Sequence
  Description of Artificial Sequence: Synthetic peptide
IDWNGGST

SEQ ID NO: 1004 - protein, 16 aa, Artificial Sequence
  Description of Artificial Sequence: Synthetic peptide
AAARYYTSSTYFPANY

SEQ ID NO: 1005 - protein, 8 aa, Artificial Sequence
  Description of Artificial Sequence: Synthetic peptide
GFDTYGMA

SEQ ID NO: 1006 - protein, 13 aa, Artificial Sequence
  Description of Artificial Sequence: Synthetic peptide
FVASIDWNGGSTY

SEQ ID NO: 1007 - protein, 15 aa, Artificial Sequence
  Description of Artificial Sequence: Synthetic peptide
AAARYYTSSTYFPAN

SEQ ID NO: 1008 - protein, 10 aa, Artificial Sequence
  Description of Artificial Sequence: Synthetic peptide
TSIASINVMG

SEQ ID NO: 1009 - protein, 9 aa, Artificial Sequence
  Description of Artificial Sequence: Synthetic peptide
RISGGGITH

SEQ ID NO: 1010 - protein, 12 aa, Artificial Sequence
  Description of Artificial Sequence: Synthetic peptide
DVFASSGHVTTY

SEQ ID NO: 1011 - protein, 5 aa, Artificial Sequence
  Description of Artificial Sequence: Synthetic peptide
INVMG

SEQ ID NO: 1012 - protein, 16 aa, Artificial Sequence
  Description of Artificial Sequence: Synthetic peptide
RISGGGITHYAESVEG

SEQ ID NO: 1013 - protein, 12 aa, Artificial Sequence
  Description of Artificial Sequence: Synthetic peptide
DVFASSGHVTTY

SEQ ID NO: 1014 - protein, 7 aa, Artificial Sequence
  Description of Artificial Sequence: Synthetic peptide
TSIASIN

SEQ ID NO: 1015 - protein, 5 aa, Artificial Sequence
  Description of Artificial Sequence: Synthetic peptide
SGGGI

SEQ ID NO: 1016 - protein, 11 aa, Artificial Sequence
  Description of Artificial Sequence: Synthetic peptide
DVFASSGHVTT

SEQ ID NO: 1017 - protein, 8 aa, Artificial Sequence
  Description of Artificial Sequence: Synthetic peptide
TSIASINV

SEQ ID NO: 1018 - protein, 7 aa, Artificial Sequence
  Description of Artificial Sequence: Synthetic peptide
ISGGGIT

SEQ ID NO: 1019 - protein, 14 aa, Artificial Sequence
  Description of Artificial Sequence: Synthetic peptide
KADVFASSGHVTTY

SEQ ID NO: 1020 - protein, 6 aa, Artificial Sequence
  Description of Artificial Sequence: Synthetic peptide
SINVMG

SEQ ID NO: 1021 - protein, 12 aa, Artificial Sequence
  Description of Artificial Sequence: Synthetic peptide
LVARISGGGITH

SEQ ID NO: 1022 - protein, 13 aa, Artificial Sequence
  Description of Artificial Sequence: Synthetic peptide
KADVFASSGHVTT

SEQ ID NO: 1023 - protein, 10 aa, Artificial Sequence
  Description of Artificial Sequence: Synthetic peptide
GRSFSSYNMV

SEQ ID NO: 1024 - protein, 10 aa, Artificial Sequence
  Description of Artificial Sequence: Synthetic peptide
AVTWSGGGTS

SEQ ID NO: 1025 - protein, 18 aa, Artificial Sequence
  Description of Artificial Sequence: Synthetic peptide
TQDWYGGSRAFRAASFHS

SEQ ID NO: 1026 - protein, 5 aa, Artificial Sequence
  Description of Artificial Sequence: Synthetic peptide
SYNMV

SEQ ID NO: 1027 - protein, 17 aa, Artificial Sequence
  Description of Artificial Sequence: Synthetic peptide
AVTWSGGGTSYADSVKG

SEQ ID NO: 1028 - protein, 18 aa, Artificial Sequence
  Description of Artificial Sequence: Synthetic peptide
TQDWYGGSRAFRAASFHS

SEQ ID NO: 1029 - protein, 7 aa, Artificial Sequence
  Description of Artificial Sequence: Synthetic peptide
GRSFSSY

SEQ ID NO: 1030 - protein, 6 aa, Artificial Sequence
  Description of Artificial Sequence: Synthetic peptide
TWSGGG

SEQ ID NO: 1031 - protein, 17 aa, Artificial Sequence
  Description of Artificial Sequence: Synthetic peptide
TQDWYGGSRAFRAASFH

SEQ ID NO: 1032 - protein, 8 aa, Artificial Sequence
  Description of Artificial Sequence: Synthetic peptide
GRSFSSYN

SEQ ID NO: 1033 - protein, 8 aa, Artificial Sequence
  Description of Artificial Sequence: Synthetic peptide
VTWSGGGT

SEQ ID NO: 1034 - protein, 20 aa, Artificial Sequence
  Description of Artificial Sequence: Synthetic peptide
AATQDWYGGSRAFRAASFHS

SEQ ID NO: 1035 - protein, 6 aa, Artificial Sequence
  Description of Artificial Sequence: Synthetic peptide
SSYNMV

SEQ ID NO: 1036 - protein, 13 aa, Artificial Sequence
  Description of Artificial Sequence: Synthetic peptide
VVAAVTWSGGGTS

SEQ ID NO: 1037 - protein, 19 aa, Artificial Sequence
  Description of Artificial Sequence: Synthetic peptide
AATQDWYGGSRAFRAASFH

SEQ ID NO: 1038 - protein, 10 aa, Artificial Sequence
  Description of Artificial Sequence: Synthetic peptide
GRTFTTYVMG

SEQ ID NO: 1039 - protein, 12 aa, Artificial Sequence
  Description of Artificial Sequence: Synthetic peptide
TISWSGSTTYKY

SEQ ID NO: 1040 - protein, 15 aa, Artificial Sequence
  Description of Artificial Sequence: Synthetic peptide
STVVADPRAPNEYDY

SEQ ID NO: 1041 - protein, 5 aa, Artificial Sequence
  Description of Artificial Sequence: Synthetic peptide
TYVMG

SEQ ID NO: 1042 - protein, 19 aa, Artificial Sequence
  Description of Artificial Sequence: Synthetic peptide
TISWSGSTTYKYYADSVKG

SEQ ID NO: 1043 - protein, 15 aa, Artificial Sequence
  Description of Artificial Sequence: Synthetic peptide
STVVADPRAPNEYDY

SEQ ID NO: 1044 - protein, 7 aa, Artificial Sequence
  Description of Artificial Sequence: Synthetic peptide
GRTFTTY

SEQ ID NO: 1045 - protein, 8 aa, Artificial Sequence
  Description of Artificial Sequence: Synthetic peptide
SWSGSTTY

SEQ ID NO: 1046 - protein, 14 aa, Artificial Sequence
  Description of Artificial Sequence: Synthetic peptide
STVVADPRAPNEYD

SEQ ID NO: 1047 - protein, 8 aa, Artificial Sequence
  Description of Artificial Sequence: Synthetic peptide
GRTFTTYV

SEQ ID NO: 1048 - protein, 10 aa, Artificial Sequence
  Description of Artificial Sequence: Synthetic peptide
ISWSGSTTYK

SEQ ID NO: 1049 - protein, 17 aa, Artificial Sequence
  Description of Artificial Sequence: Synthetic peptide
AASTVVADPRAPNEYDY

SEQ ID NO: 1050 - protein, 6 aa, Artificial Sequence
  Description of Artificial Sequence: Synthetic peptide
TTYVMG

SEQ ID NO: 1051 - protein, 15 aa, Artificial Sequence
  Description of Artificial Sequence: Synthetic peptide
FVATISWSGSTTYKY

SEQ ID NO: 1052 - protein, 16 aa, Artificial Sequence
  Description of Artificial Sequence: Synthetic peptide
AASTVVADPRAPNEYD

SEQ ID NO: 1053 - protein, 10 aa, Artificial Sequence
  Description of Artificial Sequence: Synthetic peptide
GSIFSASVMG

SEQ ID NO: 1054 - protein, 9 aa, Artificial Sequence
  Description of Artificial Sequence: Synthetic peptide
RISPGGVTH

SEQ ID NO: 1055 - protein, 8 aa, Artificial Sequence
  Description of Artificial Sequence: Synthetic peptide
DRFGFEVY

SEQ ID NO: 1056 - protein, 5 aa, Artificial Sequence
  Description of Artificial Sequence: Synthetic peptide
ASVMG

SEQ ID NO: 1057 - protein, 16 aa, Artificial Sequence
  Description of Artificial Sequence: Synthetic peptide
RISPGGVTHYADSVKG

SEQ ID NO: 1058 - protein, 8 aa, Artificial Sequence
  Description of Artificial Sequence: Synthetic peptide
DRFGFEVY

SEQ ID NO: 1059 - protein, 7 aa, Artificial Sequence
  Description of Artificial Sequence: Synthetic peptide
GSIFSAS

SEQ ID NO: 1060 - protein, 5 aa, Artificial Sequence
  Description of Artificial Sequence: Synthetic peptide
SPGGV

SEQ ID NO: 1061 - protein, 7 aa, Artificial Sequence
  Description of Artificial Sequence: Synthetic peptide
DRFGFEV

SEQ ID NO: 1062 - protein, 8 aa, Artificial Sequence
  Description of Artificial Sequence: Synthetic peptide
GSIFSASV

SEQ ID NO: 1063 - protein, 7 aa, Artificial Sequence
  Description of Artificial Sequence: Synthetic peptide
ISPGGVT

SEQ ID NO: 1064 - protein, 10 aa, Artificial Sequence
  Description of Artificial Sequence: Synthetic peptide
NADRFGFEVY

SEQ ID NO: 1065 - protein, 6 aa, Artificial Sequence
  Description of Artificial Sequence: Synthetic peptide
SASVMG

SEQ ID NO: 1066 - protein, 12 aa, Artificial Sequence
  Description of Artificial Sequence: Synthetic peptide
FVARISPGGVTH

SEQ ID NO: 1067 - protein, 9 aa, Artificial Sequence
  Description of Artificial Sequence: Synthetic peptide
NADRFGFEV

SEQ ID NO: 1068 - protein, 10 aa, Artificial Sequence
  Description of Artificial Sequence: Synthetic peptide
GSIFSIRDMG

SEQ ID NO: 1069 - protein, 9 aa, Artificial Sequence
  Description of Artificial Sequence: Synthetic peptide
IFARGGSTH

SEQ ID NO: 1070 - protein, 13 aa, Artificial Sequence
  Description of Artificial Sequence: Synthetic peptide
EVATMIQPGFRDY

SEQ ID NO: 1071 - protein, 5 aa, Artificial Sequence
  Description of Artificial Sequence: Synthetic peptide
IRDMG

SEQ ID NO: 1072 - protein, 16 aa, Artificial Sequence
  Description of Artificial Sequence: Synthetic peptide
IFARGGSTHYADSVKG

SEQ ID NO: 1073 - protein, 13 aa, Artificial Sequence
  Description of Artificial Sequence: Synthetic peptide
EVATMIQPGFRDY

SEQ ID NO: 1074 - protein, 7 aa, Artificial Sequence
  Description of Artificial Sequence: Synthetic peptide
GSIFSIR

SEQ ID NO: 1075 - protein, 5 aa, Artificial Sequence
  Description of Artificial Sequence: Synthetic peptide
ARGGS

SEQ ID NO: 1076 - protein, 12 aa, Artificial Sequence
  Description of Artificial Sequence: Synthetic peptide
EVATMIQPGFRD

SEQ ID NO: 1077 - protein, 8 aa, Artificial Sequence
  Description of Artificial Sequence: Synthetic peptide
GSIFSIRD

SEQ ID NO: 1078 - protein, 7 aa, Artificial Sequence
  Description of Artificial Sequence: Synthetic peptide
FARGGST

SEQ ID NO: 1079 - protein, 15 aa, Artificial Sequence
  Description of Artificial Sequence: Synthetic peptide
NAEVATMIQPGFRDY

SEQ ID NO: 1080 - protein, 6 aa, Artificial Sequence
  Description of Artificial Sequence: Synthetic peptide
SIRDMG

SEQ ID NO: 1081 - protein, 12 aa, Artificial Sequence
  Description of Artificial Sequence: Synthetic peptide
LVAIFARGGSTH

SEQ ID NO: 1082 - protein, 14 aa, Artificial Sequence
  Description of Artificial Sequence: Synthetic peptide
NAEVATMIQPGFRD

SEQ ID NO: 1083 - protein, 10 aa, Artificial Sequence
  Description of Artificial Sequence: Synthetic peptide
GRTFRSYAMG

SEQ ID NO: 1084 - protein, 10 aa, Artificial Sequence
  Description of Artificial Sequence: Synthetic peptide
DISWRGGRLY

SEQ ID NO: 1085 - protein, 21 aa, Artificial Sequence
  Description of Artificial Sequence: Synthetic peptide
TGDQPAFTTAQGMGAMLEYDY

SEQ ID NO: 1086 - protein, 5 aa, Artificial Sequence
  Description of Artificial Sequence: Synthetic peptide
SYAMG

SEQ ID NO: 1087 - protein, 17 aa, Artificial Sequence
  Description of Artificial Sequence: Synthetic peptide
DISWRGGRLYYADSVKG

SEQ ID NO: 1088 - protein, 21 aa, Artificial Sequence
  Description of Artificial Sequence: Synthetic peptide
TGDQPAFTTAQGMGAMLEYDY

SEQ ID NO: 1089 - protein, 7 aa, Artificial Sequence
  Description of Artificial Sequence: Synthetic peptide
GRTFRSY

SEQ ID NO: 1090 - protein, 6 aa, Artificial Sequence
  Description of Artificial Sequence: Synthetic peptide
SWRGGR

SEQ ID NO: 1091 - protein, 20 aa, Artificial Sequence
  Description of Artificial Sequence: Synthetic peptide
TGDQPAFTTAQGMGAMLEYD

SEQ ID NO: 1092 - protein, 8 aa, Artificial Sequence
  Description of Artificial Sequence: Synthetic peptide
GRTFRSYA

SEQ ID NO: 1093 - protein, 8 aa, Artificial Sequence
  Description of Artificial Sequence: Synthetic peptide
ISWRGGRL

SEQ ID NO: 1094 - protein, 23 aa, Artificial Sequence
  Description of Artificial Sequence: Synthetic peptide
AATGDQPAFTTAQGMGAMLEYDY

SEQ ID NO: 1095 - protein, 6 aa, Artificial Sequence
  Description of Artificial Sequence: Synthetic peptide
RSYAMG

SEQ ID NO: 1096 - protein, 13 aa, Artificial Sequence
  Description of Artificial Sequence: Synthetic peptide
FVADISWRGGRLY

SEQ ID NO: 1097 - protein, 22 aa, Artificial Sequence
  Description of Artificial Sequence: Synthetic peptide
AATGDQPAFTTAQGMGAMLEYD

SEQ ID NO: 1098 - protein, 10 aa, Artificial Sequence
  Description of Artificial Sequence: Synthetic peptide
GRTGSSGAMG

SEQ ID NO: 1099 - protein, 12 aa, Artificial Sequence
  Description of Artificial Sequence: Synthetic peptide
ALMWRNTVTYSY

SEQ ID NO: 1100 - protein, 16 aa, Artificial Sequence
  Description of Artificial Sequence: Synthetic peptide
DPDTYGDPRNSGAYSY

SEQ ID NO: 1101 - protein, 5 aa, Artificial Sequence
  Description of Artificial Sequence: Synthetic peptide
SGAMG

SEQ ID NO: 1102 - protein, 19 aa, Artificial Sequence
  Description of Artificial Sequence: Synthetic peptide
ALMWRNTVTYSYYADSVKG

SEQ ID NO: 1103 - protein, 16 aa, Artificial Sequence
  Description of Artificial Sequence: Synthetic peptide
DPDTYGDPRNSGAYSY

SEQ ID NO: 1104 - protein, 7 aa, Artificial Sequence
  Description of Artificial Sequence: Synthetic peptide
GRTGSSG

SEQ ID NO: 1105 - protein, 8 aa, Artificial Sequence
  Description of Artificial Sequence: Synthetic peptide
MWRNTVTY

SEQ ID NO: 1106 - protein, 15 aa, Artificial Sequence
  Description of Artificial Sequence: Synthetic peptide
DPDTYGDPRNSGAYS

SEQ ID NO: 1107 - protein, 8 aa, Artificial Sequence
  Description of Artificial Sequence: Synthetic peptide
GRTGSSGA

SEQ ID NO: 1108 - protein, 10 aa, Artificial Sequence
  Description of Artificial Sequence: Synthetic peptide
LMWRNTVTYS

SEQ ID NO: 1109 - protein, 18 aa, Artificial Sequence
  Description of Artificial Sequence: Synthetic peptide
AADPDTYGDPRNSGAYSY

SEQ ID NO: 1110 - protein, 6 aa, Artificial Sequence
  Description of Artificial Sequence: Synthetic peptide
SSGAMG

SEQ ID NO: 1111 - protein, 15 aa, Artificial Sequence
  Description of Artificial Sequence: Synthetic peptide
FVAALMWRNTVTYSY

SEQ ID NO: 1112 - protein, 17 aa, Artificial Sequence
  Description of Artificial Sequence: Synthetic peptide
AADPDTYGDPRNSGAYS

SEQ ID NO: 1113 - protein, 10 aa, Artificial Sequence
  Description of Artificial Sequence: Synthetic peptide
GDVFDIGTMA

SEQ ID NO: 1114 - protein, 9 aa, Artificial Sequence
  Description of Artificial Sequence: Synthetic peptide
SITMGGSTD

SEQ ID NO: 1115 - protein, 10 aa, Artificial Sequence
  Description of Artificial Sequence: Synthetic peptide
QFFWPKRHDY

SEQ ID NO: 1116 - protein, 5 aa, Artificial Sequence
  Description of Artificial Sequence: Synthetic peptide
IGTMA

SEQ ID NO: 1117 - protein, 16 aa, Artificial Sequence
  Description of Artificial Sequence: Synthetic peptide
SITMGGSTDVADSAKG

SEQ ID NO: 1118 - protein, 10 aa, Artificial Sequence
  Description of Artificial Sequence: Synthetic peptide
QFFWPKRHDY

SEQ ID NO: 1119 - protein, 7 aa, Artificial Sequence
  Description of Artificial Sequence: Synthetic peptide
GDVFDIG

SEQ ID NO: 1120 - protein, 5 aa, Artificial Sequence
  Description of Artificial Sequence: Synthetic peptide
TMGGS

SEQ ID NO: 1121 - protein, 9 aa, Artificial Sequence
  Description of Artificial Sequence: Synthetic peptide
QFFWPKRHD

SEQ ID NO: 1122 - protein, 8 aa, Artificial Sequence
  Description of Artificial Sequence: Synthetic peptide
GDVFDIGT

SEQ ID NO: 1123 - protein, 7 aa, Artificial Sequence
  Description of Artificial Sequence: Synthetic peptide
ITMGGST

SEQ ID NO: 1124 - protein, 12 aa, Artificial Sequence
  Description of Artificial Sequence: Synthetic peptide
NAQFFWPKRHDY

SEQ ID NO: 1125 - protein, 6 aa, Artificial Sequence
  Description of Artificial Sequence: Synthetic peptide
DIGTMA

SEQ ID NO: 1126 - protein, 12 aa, Artificial Sequence
  Description of Artificial Sequence: Synthetic peptide
LVASITMGGSTD

SEQ ID NO: 1127 - protein, 11 aa, Artificial Sequence
  Description of Artificial Sequence: Synthetic peptide
NAQFFWPKRHD

SEQ ID NO: 1128 - protein, 10 aa, Artificial Sequence
  Description of Artificial Sequence: Synthetic peptide
GIDVSISTIM

SEQ ID NO: 1129 - protein, 10 aa, Artificial Sequence
  Description of Artificial Sequence: Synthetic peptide
DVIPSGRSTT

SEQ ID NO: 1130 - protein, 7 aa, Artificial Sequence
  Description of Artificial Sequence: Synthetic peptide
FVRRENY

SEQ ID NO: 1131 - protein, 5 aa, Artificial Sequence
  Description of Artificial Sequence: Synthetic peptide
ISTIM

SEQ ID NO: 1132 - protein, 17 aa, Artificial Sequence
  Description of Artificial Sequence: Synthetic peptide
DVIPSGRSTTYTESVKG

SEQ ID NO: 1133 - protein, 7 aa, Artificial Sequence
  Description of Artificial Sequence: Synthetic peptide
FVRRENY

SEQ ID NO: 1134 - protein, 7 aa, Artificial Sequence
  Description of Artificial Sequence: Synthetic peptide
GIDVSIS

SEQ ID NO: 1135 - protein, 6 aa, Artificial Sequence
  Description of Artificial Sequence: Synthetic peptide
IPSGRS

SEQ ID NO: 1136 - protein, 6 aa, Artificial Sequence
  Description of Artificial Sequence: Synthetic peptide
FVRREN

SEQ ID NO: 1137 - protein, 8 aa, Artificial Sequence
  Description of Artificial Sequence: Synthetic peptide
GIDVSIST

SEQ ID NO: 1138 - protein, 8 aa, Artificial Sequence
  Description of Artificial Sequence: Synthetic peptide
VIPSGRST

SEQ ID NO: 1139 - protein, 9 aa, Artificial Sequence
  Description of Artificial Sequence: Synthetic peptide
NAFVRRENY

SEQ ID NO: 1140 - protein, 6 aa, Artificial Sequence
  Description of Artificial Sequence: Synthetic peptide
SISTIM

SEQ ID NO: 1141 - protein, 13 aa, Artificial Sequence
  Description of Artificial Sequence: Synthetic peptide
LVADVIPSGRSTT

SEQ ID NO: 1142 - protein, 8 aa, Artificial Sequence
  Description of Artificial Sequence: Synthetic peptide
NAFVRREN

SEQ ID NO: 1143 - protein, 10 aa, Artificial Sequence
  Description of Artificial Sequence: Synthetic peptide
GRTGSSGAMG

SEQ ID NO: 1144 - protein, 12 aa, Artificial Sequence
  Description of Artificial Sequence: Synthetic peptide
ALMWRNTVTYKY

SEQ ID NO: 1145 - protein, 16 aa, Artificial Sequence
  Description of Artificial Sequence: Synthetic peptide
DPDTYGDPRNSGAYDY

SEQ ID NO: 1146 - protein, 5 aa, Artificial Sequence
  Description of Artificial Sequence: Synthetic peptide
SGAMG

SEQ ID NO: 1147 - protein, 19 aa, Artificial Sequence
  Description of Artificial Sequence: Synthetic peptide
ALMWRNTVTYKYYEDSVKG

SEQ ID NO: 1148 - protein, 16 aa, Artificial Sequence
  Description of Artificial Sequence: Synthetic peptide
DPDTYGDPRNSGAYDY

SEQ ID NO: 1149 - protein, 7 aa, Artificial Sequence
  Description of Artificial Sequence: Synthetic peptide
GRTGSSG

SEQ ID NO: 1150 - protein, 8 aa, Artificial Sequence
  Description of Artificial Sequence: Synthetic peptide
MWRNTVTY

SEQ ID NO: 1151 - protein, 15 aa, Artificial Sequence
  Description of Artificial Sequence: Synthetic peptide
DPDTYGDPRNSGAYD

SEQ ID NO: 1152 - protein, 8 aa, Artificial Sequence
  Description of Artificial Sequence: Synthetic peptide
GRTGSSGA

SEQ ID NO: 1153 - protein, 10 aa, Artificial Sequence
  Description of Artificial Sequence: Synthetic peptide
LMWRNTVTYK

SEQ ID NO: 1154 - protein, 18 aa, Artificial Sequence
  Description of Artificial Sequence: Synthetic peptide
AADPDTYGDPRNSGAYDY

SEQ ID NO: 1155 - protein, 6 aa, Artificial Sequence
  Description of Artificial Sequence: Synthetic peptide
SSGAMG

SEQ ID NO: 1156 - protein, 15 aa, Artificial Sequence
  Description of Artificial Sequence: Synthetic peptide
FVAALMWRNTVTYKY

SEQ ID NO: 1157 - protein, 17 aa, Artificial Sequence
  Description of Artificial Sequence: Synthetic peptide
AADPDTYGDPRNSGAYD

SEQ ID NO: 1158 - protein, 12 aa, Artificial Sequence
  Description of Artificial Sequence: Synthetic peptide
GRTLSFDTYAMA

SEQ ID NO: 1159 - protein, 10 aa, Artificial Sequence
  Description of Artificial Sequence: Synthetic peptide
SIDYNGGSTD

SEQ ID NO: 1160 - protein, 14 aa, Artificial Sequence
  Description of Artificial Sequence: Synthetic peptide
ARYYRSGTSFPVNY

SEQ ID NO: 1161 - protein, 7 aa, Artificial Sequence
  Description of Artificial Sequence: Synthetic peptide
FDTYAMA

SEQ ID NO: 1162 - protein, 17 aa, Artificial Sequence
  Description of Artificial Sequence: Synthetic peptide
SIDYNGGSTDYADSVKG

SEQ ID NO: 1163 - protein, 14 aa, Artificial Sequence
  Description of Artificial Sequence: Synthetic peptide
ARYYRSGTSFPVNY

SEQ ID NO: 1164 - protein, 9 aa, Artificial Sequence
  Description of Artificial Sequence: Synthetic peptide
GRTLSFDTY

SEQ ID NO: 1165 - protein, 6 aa, Artificial Sequence
  Description of Artificial Sequence: Synthetic peptide
DYNGGS

SEQ ID NO: 1166 - protein, 13 aa, Artificial Sequence
  Description of Artificial Sequence: Synthetic peptide
ARYYRSGTSFPVN

SEQ ID NO: 1167 - protein, 10 aa, Artificial Sequence
  Description of Artificial Sequence: Synthetic peptide
GRTLSFDTYA

SEQ ID NO: 1168 - protein, 8 aa, Artificial Sequence
  Description of Artificial Sequence: Synthetic peptide
IDYNGGST

SEQ ID NO: 1169 - protein, 16 aa, Artificial Sequence
  Description of Artificial Sequence: Synthetic peptide
ASARYYRSGTSFPVNY

SEQ ID NO: 1170 - protein, 8 aa, Artificial Sequence
  Description of Artificial Sequence: Synthetic peptide
SFDTYAMA

SEQ ID NO: 1171 - protein, 13 aa, Artificial Sequence
  Description of Artificial Sequence: Synthetic peptide
FVASIDYNGGSTD

SEQ ID NO: 1172 - protein, 15 aa, Artificial Sequence
  Description of Artificial Sequence: Synthetic peptide
ASARYYRSGTSFPVN

SEQ ID NO: 1173 - protein, 10 aa, Artificial Sequence
  Description of Artificial Sequence: Synthetic peptide
GLTFSSYRMG

SEQ ID NO: 1174 - protein, 13 aa, Artificial Sequence
  Description of Artificial Sequence: Synthetic peptide
AIDWNGRGTYYRY

SEQ ID NO: 1175 - protein, 16 aa, Artificial Sequence
  Description of Artificial Sequence: Synthetic peptide
DSRTSIDPRTSGHYRY

SEQ ID NO: 1176 - protein, 5 aa, Artificial Sequence
  Description of Artificial Sequence: Synthetic peptide
SYRMG

SEQ ID NO: 1177 - protein, 20 aa, Artificial Sequence
  Description of Artificial Sequence: Synthetic peptide
AIDWNGRGTYYRYYADSVKG

SEQ ID NO: 1178 - protein, 16 aa, Artificial Sequence
  Description of Artificial Sequence: Synthetic peptide
DSRTSIDPRTSGHYRY

SEQ ID NO: 1179 - protein, 7 aa, Artificial Sequence
  Description of Artificial Sequence: Synthetic peptide
GLTFSSY

SEQ ID NO: 1180 - protein, 9 aa, Artificial Sequence
  Description of Artificial Sequence: Synthetic peptide
DWNGRGTYY

SEQ ID NO: 1181 - protein, 15 aa, Artificial Sequence
  Description of Artificial Sequence: Synthetic peptide
DSRTSIDPRTSGHYR

SEQ ID NO: 1182 - protein, 8 aa, Artificial Sequence
  Description of Artificial Sequence: Synthetic peptide
GLTFSSYR

SEQ ID NO: 1183 - protein, 11 aa, Artificial Sequence
  Description of Artificial Sequence: Synthetic peptide
IDWNGRGTYYR

SEQ ID NO: 1184 - protein, 18 aa, Artificial Sequence
  Description of Artificial Sequence: Synthetic peptide
AIDSRTSIDPRTSGHYRY

SEQ ID NO: 1185 - protein, 6 aa, Artificial Sequence
  Description of Artificial Sequence: Synthetic peptide
SSYRMG

SEQ ID NO: 1186 - protein, 16 aa, Artificial Sequence
  Description of Artificial Sequence: Synthetic peptide
FVAAIDWNGRGTYYRY

SEQ ID NO: 1187 - protein, 17 aa, Artificial Sequence
  Description of Artificial Sequence: Synthetic peptide
AIDSRTSIDPRTSGHYR

SEQ ID NO: 1188 - protein, 10 aa, Artificial Sequence
  Description of Artificial Sequence: Synthetic peptide
GRTFTTYVMG

SEQ ID NO: 1189 - protein, 12 aa, Artificial Sequence
  Description of Artificial Sequence: Synthetic peptide
TITWSGSTNYKY

SEQ ID NO: 1190 - protein, 15 aa, Artificial Sequence
  Description of Artificial Sequence: Synthetic peptide
STVVTDPRKLNEYAY

SEQ ID NO: 1191 - protein, 5 aa, Artificial Sequence
  Description of Artificial Sequence: Synthetic peptide
TYVMG

SEQ ID NO: 1192 - protein, 19 aa, Artificial Sequence
  Description of Artificial Sequence: Synthetic peptide
TITWSGSTNYKYYADPVKG

SEQ ID NO: 1193 - protein, 15 aa, Artificial Sequence
  Description of Artificial Sequence: Synthetic peptide
STVVTDPRKLNEYAY

SEQ ID NO: 1194 - protein, 7 aa, Artificial Sequence
  Description of Artificial Sequence: Synthetic peptide
GRTFTTY

SEQ ID NO: 1195 - protein, 8 aa, Artificial Sequence
  Description of Artificial Sequence: Synthetic peptide
TWSGSTNY

SEQ ID NO: 1196 - protein, 14 aa, Artificial Sequence
  Description of Artificial Sequence: Synthetic peptide
STVVTDPRKLNEYA

SEQ ID NO: 1197 - protein, 8 aa, Artificial Sequence
  Description of Artificial Sequence: Synthetic peptide
GRTFTTYV

SEQ ID NO: 1198 - protein, 10 aa, Artificial Sequence
  Description of Artificial Sequence: Synthetic peptide
ITWSGSTNYK

SEQ ID NO: 1199 - protein, 17 aa, Artificial Sequence
  Description of Artificial Sequence: Synthetic peptide
TSSTVVTDPRKLNEYAY

SEQ ID NO: 1200 - protein, 6 aa, Artificial Sequence
  Description of Artificial Sequence: Synthetic peptide
TTYVMG

SEQ ID NO: 1201 - protein, 15 aa, Artificial Sequence
  Description of Artificial Sequence: Synthetic peptide
FVATITWSGSTNYKY

SEQ ID NO: 1202 - protein, 16 aa, Artificial Sequence
  Description of Artificial Sequence: Synthetic peptide
TSSTVVTDPRKLNEYA

SEQ ID NO: 1203 - protein, 10 aa, Artificial Sequence
  Description of Artificial Sequence: Synthetic peptide
GRTFSSYTMG

SEQ ID NO: 1204 - protein, 13 aa, Artificial Sequence
  Description of Artificial Sequence: Synthetic peptide
AISWSSDGTYYKY

SEQ ID NO: 1205 - protein, 17 aa, Artificial Sequence
  Description of Artificial Sequence: Synthetic peptide
SSSGTYGDPRSEREYRY

SEQ ID NO: 1206 - protein, 5 aa, Artificial Sequence
  Description of Artificial Sequence: Synthetic peptide
SYTMG

SEQ ID NO: 1207 - protein, 20 aa, Artificial Sequence
  Description of Artificial Sequence: Synthetic peptide
AISWSSDGTYYKYYTDTVKG

SEQ ID NO: 1208 - protein, 17 aa, Artificial Sequence
  Description of Artificial Sequence: Synthetic peptide
SSSGTYGDPRSEREYRY

SEQ ID NO: 1209 - protein, 7 aa, Artificial Sequence
  Description of Artificial Sequence: Synthetic peptide
GRTFSSY

SEQ ID NO: 1210 - protein, 9 aa, Artificial Sequence
  Description of Artificial Sequence: Synthetic peptide
SWSSDGTYY

SEQ ID NO: 1211 - protein, 16 aa, Artificial Sequence
  Description of Artificial Sequence: Synthetic peptide
SSSGTYGDPRSEREYR

SEQ ID NO: 1212 - protein, 8 aa, Artificial Sequence
  Description of Artificial Sequence: Synthetic peptide
GRTFSSYT

SEQ ID NO: 1213 - protein, 11 aa, Artificial Sequence
  Description of Artificial Sequence: Synthetic peptide
ISWSSDGTYYK

SEQ ID NO: 1214 - protein, 19 aa, Artificial Sequence
  Description of Artificial Sequence: Synthetic peptide
AASSSGTYGDPRSEREYRY

SEQ ID NO: 1215 - protein, 6 aa, Artificial Sequence
  Description of Artificial Sequence: Synthetic peptide
SSYTMG

SEQ ID NO: 1216 - protein, 16 aa, Artificial Sequence
  Description of Artificial Sequence: Synthetic peptide
FVSAISWSSDGTYYKY

SEQ ID NO: 1217 - protein, 18 aa, Artificial Sequence
  Description of Artificial Sequence: Synthetic peptide
AASSSGTYGDPRSEREYR

SEQ ID NO: 1218 - protein, 10 aa, Artificial Sequence
  Description of Artificial Sequence: Synthetic peptide
GLPFSSSRMA

SEQ ID NO: 1219 - protein, 12 aa, Artificial Sequence
  Description of Artificial Sequence: Synthetic peptide
AIGWRGRTSYKY

SEQ ID NO: 1220 - protein, 16 aa, Artificial Sequence
  Description of Artificial Sequence: Synthetic peptide
HPNDDGDPRISGNYQY

SEQ ID NO: 1221 - protein, 5 aa, Artificial Sequence
  Description of Artificial Sequence: Synthetic peptide
SSRMA

SEQ ID NO: 1222 - protein, 19 aa, Artificial Sequence
  Description of Artificial Sequence: Synthetic peptide
AIGWRGRTSYKYYADSVKG

SEQ ID NO: 1223 - protein, 16 aa, Artificial Sequence
  Description of Artificial Sequence: Synthetic peptide
HPNDDGDPRISGNYQY

SEQ ID NO: 1224 - protein, 7 aa, Artificial Sequence
  Description of Artificial Sequence: Synthetic peptide
GLPFSSS

SEQ ID NO: 1225 - protein, 8 aa, Artificial Sequence
  Description of Artificial Sequence: Synthetic peptide
GWRGRTSY

SEQ ID NO: 1226 - protein, 15 aa, Artificial Sequence
  Description of Artificial Sequence: Synthetic peptide
HPNDDGDPRISGNYQ

SEQ ID NO: 1227 - protein, 8 aa, Artificial Sequence
  Description of Artificial Sequence: Synthetic peptide
GLPFSSSR

SEQ ID NO: 1228 - protein, 10 aa, Artificial Sequence
  Description of Artificial Sequence: Synthetic peptide
IGWRGRTSYK

SEQ ID NO: 1229 - protein, 18 aa, Artificial Sequence
  Description of Artificial Sequence: Synthetic peptide
AAHPNDDGDPRISGNYQY

SEQ ID NO: 1230 - protein, 6 aa, Artificial Sequence
  Description of Artificial Sequence: Synthetic peptide
SSSRMA

SEQ ID NO: 1231 - protein, 15 aa, Artificial Sequence
  Description of Artificial Sequence: Synthetic peptide
FVAAIGWRGRTSYKY

SEQ ID NO: 1232 - protein, 17 aa, Artificial Sequence
  Description of Artificial Sequence: Synthetic peptide
AAHPNDDGDPRISGNYQ

SEQ ID NO: 1233 - protein, 10 aa, Artificial Sequence
  Description of Artificial Sequence: Synthetic peptide
GTAAGIDVMG

SEQ ID NO: 1234 - protein, 9 aa, Artificial Sequence
  Description of Artificial Sequence: Synthetic peptide
RIFSNDVTH

SEQ ID NO: 1235 - protein, 11 aa, Artificial Sequence
  Description of Artificial Sequence: Synthetic peptide
RIWTGSTTVDY

SEQ ID NO: 1236 - protein, 5 aa, Artificial Sequence
  Description of Artificial Sequence: Synthetic peptide
IDVMG

SEQ ID NO: 1237 - protein, 16 aa, Artificial Sequence
  Description of Artificial Sequence: Synthetic peptide
RIFSNDVTHYADSVTG

SEQ ID NO: 1238 - protein, 11 aa, Artificial Sequence
  Description of Artificial Sequence: Synthetic peptide
RIWTGSTTVDY

SEQ ID NO: 1239 - protein, 7 aa, Artificial Sequence
  Description of Artificial Sequence: Synthetic peptide
GTAAGID

SEQ ID NO: 1240 - protein, 5 aa, Artificial Sequence
  Description of Artificial Sequence: Synthetic peptide
FSNDV

SEQ ID NO: 1241 - protein, 10 aa, Artificial Sequence
  Description of Artificial Sequence: Synthetic peptide
RIWTGSTTVD

SEQ ID NO: 1242 - protein, 8 aa, Artificial Sequence
  Description of Artificial Sequence: Synthetic peptide
GTAAGIDV

SEQ ID NO: 1243 - protein, 7 aa, Artificial Sequence
  Description of Artificial Sequence: Synthetic peptide
IFSNDVT

SEQ ID NO: 1244 - protein, 13 aa, Artificial Sequence
  Description of Artificial Sequence: Synthetic peptide
NARIWTGSTTVDY

SEQ ID NO: 1245 - protein, 6 aa, Artificial Sequence
  Description of Artificial Sequence: Synthetic peptide
GIDVMG

SEQ ID NO: 1246 - protein, 12 aa, Artificial Sequence
  Description of Artificial Sequence: Synthetic peptide
FVARIFSNDVTH

SEQ ID NO: 1247 - protein, 12 aa, Artificial Sequence
  Description of Artificial Sequence: Synthetic peptide
NARIWTGSTTVD

SEQ ID NO: 1248 - protein, 10 aa, Artificial Sequence
  Description of Artificial Sequence: Synthetic peptide
GSIASVRDMA

SEQ ID NO: 1249 - protein, 9 aa, Artificial Sequence
  Description of Artificial Sequence: Synthetic peptide
IFARGGTTH

SEQ ID NO: 1250 - protein, 13 aa, Artificial Sequence
  Description of Artificial Sequence: Synthetic peptide
EVATMFQPGFRDY

SEQ ID NO: 1251 - protein, 5 aa, Artificial Sequence
  Description of Artificial Sequence: Synthetic peptide
VRDMA

SEQ ID NO: 1252 - protein, 16 aa, Artificial Sequence
  Description of Artificial Sequence: Synthetic peptide
IFARGGTTHYADSVKG

SEQ ID NO: 1253 - protein, 13 aa, Artificial Sequence
  Description of Artificial Sequence: Synthetic peptide
EVATMFQPGFRDY

SEQ ID NO: 1254 - protein, 7 aa, Artificial Sequence
  Description of Artificial Sequence: Synthetic peptide
GSIASVR

SEQ ID NO: 1255 - protein, 5 aa, Artificial Sequence
  Description of Artificial Sequence: Synthetic peptide
ARGGT

SEQ ID NO: 1256 - protein, 12 aa, Artificial Sequence
  Description of Artificial Sequence: Synthetic peptide
EVATMFQPGFRD

SEQ ID NO: 1257 - protein, 8 aa, Artificial Sequence
  Description of Artificial Sequence: Synthetic peptide
GSIASVRD

SEQ ID NO: 1258 - protein, 7 aa, Artificial Sequence
  Description of Artificial Sequence: Synthetic peptide
FARGGTT

SEQ ID NO: 1259 - protein, 15 aa, Artificial Sequence
  Description of Artificial Sequence: Synthetic peptide
NAEVATMFQPGFRDY

SEQ ID NO: 1260 - protein, 6 aa, Artificial Sequence
  Description of Artificial Sequence: Synthetic peptide
SVRDMA

SEQ ID NO: 1261 - protein, 12 aa, Artificial Sequence
  Description of Artificial Sequence: Synthetic peptide
LVAIFARGGTTH

SEQ ID NO: 1262 - protein, 14 aa, Artificial Sequence
  Description of Artificial Sequence: Synthetic peptide
NAEVATMFQPGFRD

SEQ ID NO: 1263 - protein, 10 aa, Artificial Sequence
  Description of Artificial Sequence: Synthetic peptide
GRTFSNYAMG

SEQ ID NO: 1264 - protein, 10 aa, Artificial Sequence
  Description of Artificial Sequence: Synthetic peptide
GISRSGGSTY

SEQ ID NO: 1265 - protein, 13 aa, Artificial Sequence
  Description of Artificial Sequence: Synthetic peptide
DGLDYALGFRGDY

SEQ ID NO: 1266 - protein, 5 aa, Artificial Sequence
  Description of Artificial Sequence: Synthetic peptide
NYAMG

SEQ ID NO: 1267 - protein, 17 aa, Artificial Sequence
  Description of Artificial Sequence: Synthetic peptide
GISRSGGSTYSADSVKG

SEQ ID NO: 1268 - protein, 13 aa, Artificial Sequence
  Description of Artificial Sequence: Synthetic peptide
DGLDYALGFRGDY

SEQ ID NO: 1269 - protein, 7 aa, Artificial Sequence
  Description of Artificial Sequence: Synthetic peptide
GRTFSNY

SEQ ID NO: 1270 - protein, 6 aa, Artificial Sequence
  Description of Artificial Sequence: Synthetic peptide
SRSGGS

SEQ ID NO: 1271 - protein, 12 aa, Artificial Sequence
  Description of Artificial Sequence: Synthetic peptide
DGLDYALGFRGD

SEQ ID NO: 1272 - protein, 8 aa, Artificial Sequence
  Description of Artificial Sequence: Synthetic peptide
GRTFSNYA

SEQ ID NO: 1273 - protein, 8 aa, Artificial Sequence
  Description of Artificial Sequence: Synthetic peptide
ISRSGGST

SEQ ID NO: 1274 - protein, 15 aa, Artificial Sequence
  Description of Artificial Sequence: Synthetic peptide
AADGLDYALGFRGDY

SEQ ID NO: 1275 - protein, 6 aa, Artificial Sequence
  Description of Artificial Sequence: Synthetic peptide
SNYAMG

SEQ ID NO: 1276 - protein, 13 aa, Artificial Sequence
  Description of Artificial Sequence: Synthetic peptide
FVAGISRSGGSTY

SEQ ID NO: 1277 - protein, 14 aa, Artificial Sequence
  Description of Artificial Sequence: Synthetic peptide
AADGLDYALGFRGD

SEQ ID NO: 1278 - protein, 10 aa, Artificial Sequence
  Description of Artificial Sequence: Synthetic peptide
GRTINGYVMG

SEQ ID NO: 1279 - protein, 10 aa, Artificial Sequence
  Description of Artificial Sequence: Synthetic peptide
RIDWSGSSTD

SEQ ID NO: 1280 - protein, 15 aa, Artificial Sequence
  Description of Artificial Sequence: Synthetic peptide
SAYYSGYVTHRDFGS

SEQ ID NO: 1281 - protein, 5 aa, Artificial Sequence
  Description of Artificial Sequence: Synthetic peptide
GYVMG

SEQ ID NO: 1282 - protein, 17 aa, Artificial Sequence
  Description of Artificial Sequence: Synthetic peptide
RIDWSGSSTDYADSVKG

SEQ ID NO: 1283 - protein, 15 aa, Artificial Sequence
  Description of Artificial Sequence: Synthetic peptide
SAYYSGYVTHRDFGS

SEQ ID NO: 1284 - protein, 7 aa, Artificial Sequence
  Description of Artificial Sequence: Synthetic peptide
GRTINGY

SEQ ID NO: 1285 - protein, 6 aa, Artificial Sequence
  Description of Artificial Sequence: Synthetic peptide
DWSGSS

SEQ ID NO: 1286 - protein, 14 aa, Artificial Sequence
  Description of Artificial Sequence: Synthetic peptide
SAYYSGYVTHRDFG

SEQ ID NO: 1287 - protein, 8 aa, Artificial Sequence
  Description of Artificial Sequence: Synthetic peptide
GRTINGYV

SEQ ID NO: 1288 - protein, 8 aa, Artificial Sequence
  Description of Artificial Sequence: Synthetic peptide
IDWSGSST

SEQ ID NO: 1289 - protein, 17 aa, Artificial Sequence
  Description of Artificial Sequence: Synthetic peptide
AGSAYYSGYVTHRDFGS

SEQ ID NO: 1290 - protein, 6 aa, Artificial Sequence
  Description of Artificial Sequence: Synthetic peptide
NGYVMG

SEQ ID NO: 1291 - protein, 13 aa, Artificial Sequence
  Description of Artificial Sequence: Synthetic peptide
FVARIDWSGSSTD

SEQ ID NO: 1292 - protein, 16 aa, Artificial Sequence
  Description of Artificial Sequence: Synthetic peptide
AGSAYYSGYVTHRDFG

SEQ ID NO: 1293 - protein, 10 aa, Artificial Sequence
  Description of Artificial Sequence: Synthetic peptide
GSIFAINGMG

SEQ ID NO: 1294 - protein, 9 aa, Artificial Sequence
  Description of Artificial Sequence: Synthetic peptide
VITRGGSTN

SEQ ID NO: 1295 - protein, 15 aa, Artificial Sequence
  Description of Artificial Sequence: Synthetic peptide
TGVLAGWAAGDGMDY

SEQ ID NO: 1296 - protein, 5 aa, Artificial Sequence
  Description of Artificial Sequence: Synthetic peptide
INGMG

SEQ ID NO: 1297 - protein, 16 aa, Artificial Sequence
  Description of Artificial Sequence: Synthetic peptide
VITRGGSTNYADSVKG

SEQ ID NO: 1298 - protein, 15 aa, Artificial Sequence
  Description of Artificial Sequence: Synthetic peptide
TGVLAGWAAGDGMDY

SEQ ID NO: 1299 - protein, 7 aa, Artificial Sequence
  Description of Artificial Sequence: Synthetic peptide
GSIFAIN

SEQ ID NO: 1300 - protein, 5 aa, Artificial Sequence
  Description of Artificial Sequence: Synthetic peptide
TRGGS

SEQ ID NO: 1301 - protein, 14 aa, Artificial Sequence
  Description of Artificial Sequence: Synthetic peptide
TGVLAGWAAGDGMD

SEQ ID NO: 1302 - protein, 8 aa, Artificial Sequence
  Description of Artificial Sequence: Synthetic peptide
GSIFAING

SEQ ID NO: 1303 - protein, 7 aa, Artificial Sequence
  Description of Artificial Sequence: Synthetic peptide
ITRGGST

SEQ ID NO: 1304 - protein, 17 aa, Artificial Sequence
  Description of Artificial Sequence: Synthetic peptide
AATGVLAGWAAGDGMDY

SEQ ID NO: 1305 - protein, 6 aa, Artificial Sequence
  Description of Artificial Sequence: Synthetic peptide
AINGMG

SEQ ID NO: 1306 - protein, 12 aa, Artificial Sequence
  Description of Artificial Sequence: Synthetic peptide
LVAVITRGGSTN

SEQ ID NO: 1307 - protein, 16 aa, Artificial Sequence
  Description of Artificial Sequence: Synthetic peptide
AATGVLAGWAAGDGMD

SEQ ID NO: 1308 - protein, 10 aa, Artificial Sequence
  Description of Artificial Sequence: Synthetic peptide
GRTFSPYAMG

SEQ ID NO: 1309 - protein, 12 aa, Artificial Sequence
  Description of Artificial Sequence: Synthetic peptide
AIRWSGATTYKY

SEQ ID NO: 1310 - protein, 19 aa, Artificial Sequence
  Description of Artificial Sequence: Synthetic peptide
DRVPKDISIDPRNPKDWDY

SEQ ID NO: 1311 - protein, 5 aa, Artificial Sequence
  Description of Artificial Sequence: Synthetic peptide
PYAMG

SEQ ID NO: 1312 - protein, 19 aa, Artificial Sequence
  Description of Artificial Sequence: Synthetic peptide
AIRWSGATTYKYVGDSVQG

SEQ ID NO: 1313 - protein, 19 aa, Artificial Sequence
  Description of Artificial Sequence: Synthetic peptide
DRVPKDISIDPRNPKDWDY

SEQ ID NO: 1314 - protein, 7 aa, Artificial Sequence
  Description of Artificial Sequence: Synthetic peptide
GRTFSPY

SEQ ID NO: 1315 - protein, 8 aa, Artificial Sequence
  Description of Artificial Sequence: Synthetic peptide
RWSGATTY

SEQ ID NO: 1316 - protein, 18 aa, Artificial Sequence
  Description of Artificial Sequence: Synthetic peptide
DRVPKDISIDPRNPKDWD

SEQ ID NO: 1317 - protein, 8 aa, Artificial Sequence
  Description of Artificial Sequence: Synthetic peptide
GRTFSPYA

SEQ ID NO: 1318 - protein, 10 aa, Artificial Sequence
  Description of Artificial Sequence: Synthetic peptide
IRWSGATTYK

SEQ ID NO: 1319 - protein, 21 aa, Artificial Sequence
  Description of Artificial Sequence: Synthetic peptide
AADRVPKDISIDPRNPKDWDY

SEQ ID NO: 1320 - protein, 6 aa, Artificial Sequence
  Description of Artificial Sequence: Synthetic peptide
SPYAMG

SEQ ID NO: 1321 - protein, 15 aa, Artificial Sequence
  Description of Artificial Sequence: Synthetic peptide
FVAAIRWSGATTYKY

SEQ ID NO: 1322 - protein, 20 aa, Artificial Sequence
  Description of Artificial Sequence: Synthetic peptide
AADRVPKDISIDPRNPKDWD

SEQ ID NO: 1323 - protein, 10 aa, Artificial Sequence
  Description of Artificial Sequence: Synthetic peptide
GRSFSSYNMG

SEQ ID NO: 1324 - protein, 10 aa, Artificial Sequence
  Description of Artificial Sequence: Synthetic peptide
VVTWSGGGTS

SEQ ID NO: 1325 - protein, 18 aa, Artificial Sequence
  Description of Artificial Sequence: Synthetic peptide
TQDWYGGTRAFHAASFHS

SEQ ID NO: 1326 - protein, 5 aa, Artificial Sequence
  Description of Artificial Sequence: Synthetic peptide
SYNMG

SEQ ID NO: 1327 - protein, 17 aa, Artificial Sequence
  Description of Artificial Sequence: Synthetic peptide
VVTWSGGGTSYADSVKG

SEQ ID NO: 1328 - protein, 18 aa, Artificial Sequence
  Description of Artificial Sequence: Synthetic peptide
TQDWYGGTRAFHAASFHS

SEQ ID NO: 1329 - protein, 7 aa, Artificial Sequence
  Description of Artificial Sequence: Synthetic peptide
GRSFSSY

SEQ ID NO: 1330 - protein, 6 aa, Artificial Sequence
  Description of Artificial Sequence: Synthetic peptide
TWSGGG

SEQ ID NO: 1331 - protein, 17 aa, Artificial Sequence
  Description of Artificial Sequence: Synthetic peptide
TQDWYGGTRAFHAASFH

SEQ ID NO: 1332 - protein, 8 aa, Artificial Sequence
  Description of Artificial Sequence: Synthetic peptide
GRSFSSYN

SEQ ID NO: 1333 - protein, 8 aa, Artificial Sequence
  Description of Artificial Sequence: Synthetic peptide
VTWSGGGT

SEQ ID NO: 1334 - protein, 20 aa, Artificial Sequence
  Description of Artificial Sequence: Synthetic peptide
AATQDWYGGTRAFHAASFHS

SEQ ID NO: 1335 - protein, 6 aa, Artificial Sequence
  Description of Artificial Sequence: Synthetic peptide
SSYNMG

SEQ ID NO: 1336 - protein, 13 aa, Artificial Sequence
  Description of Artificial Sequence: Synthetic peptide
LVAVVTWSGGGTS

SEQ ID NO: 1337 - protein, 19 aa, Artificial Sequence
  Description of Artificial Sequence: Synthetic peptide
AATQDWYGGTRAFHAASFH

SEQ ID NO: 1338 - protein, 10 aa, Artificial Sequence
  Description of Artificial Sequence: Synthetic peptide
GRTFTSYTMG

SEQ ID NO: 1339 - protein, 10 aa, Artificial Sequence
  Description of Artificial Sequence: Synthetic peptide
AIKWNGGSTY

SEQ ID NO: 1340 - protein, 24 aa, Artificial Sequence
  Description of Artificial Sequence: Synthetic peptide
DGDPYFSPTDGIVWHAPHQSEYDY

SEQ ID NO: 1341 - protein, 5 aa, Artificial Sequence
  Description of Artificial Sequence: Synthetic peptide
SYTMG

SEQ ID NO: 1342 - protein, 17 aa, Artificial Sequence
  Description of Artificial Sequence: Synthetic peptide
AIKWNGGSTYYADSVKG

SEQ ID NO: 1343 - protein, 24 aa, Artificial Sequence
  Description of Artificial Sequence: Synthetic peptide
DGDPYFSPTDGIVWHAPHQSEYDY

SEQ ID NO: 1344 - protein, 7 aa, Artificial Sequence
  Description of Artificial Sequence: Synthetic peptide
GRTFTSY

SEQ ID NO: 1345 - protein, 6 aa, Artificial Sequence
  Description of Artificial Sequence: Synthetic peptide
KWNGGS

SEQ ID NO: 1346 - protein, 23 aa, Artificial Sequence
  Description of Artificial Sequence: Synthetic peptide
DGDPYFSPTDGIVWHAPHQSEYD

SEQ ID NO: 1347 - protein, 8 aa, Artificial Sequence
  Description of Artificial Sequence: Synthetic peptide
GRTFTSYT

SEQ ID NO: 1348 - protein, 8 aa, Artificial Sequence
  Description of Artificial Sequence: Synthetic peptide
IKWNGGST

SEQ ID NO: 1349 - protein, 26 aa, Artificial Sequence
  Description of Artificial Sequence: Synthetic peptide
AADGDPYFSPTDGIVWHAPHQSEYDY

SEQ ID NO: 1350 - protein, 6 aa, Artificial Sequence
  Description of Artificial Sequence: Synthetic peptide
TSYTMG

SEQ ID NO: 1351 - protein, 13 aa, Artificial Sequence
  Description of Artificial Sequence: Synthetic peptide
FVAAIKWNGGSTY

SEQ ID NO: 1352 - protein, 25 aa, Artificial Sequence
  Description of Artificial Sequence: Synthetic peptide
AADGDPYFSPTDGIVWHAPHQSEYD

SEQ ID NO: 1353 - protein, 10 aa, Artificial Sequence
  Description of Artificial Sequence: Synthetic peptide
GFTFRTYYMG

SEQ ID NO: 1354 - protein, 10 aa, Artificial Sequence
  Description of Artificial Sequence: Synthetic peptide
VTRSSDDVTY

SEQ ID NO: 1355 - protein, 19 aa, Artificial Sequence
  Description of Artificial Sequence: Synthetic peptide
KPVPITRYSFPQIGEEYDY

SEQ ID NO: 1356 - protein, 5 aa, Artificial Sequence
  Description of Artificial Sequence: Synthetic peptide
TYYMG

SEQ ID NO: 1357 - protein, 17 aa, Artificial Sequence
  Description of Artificial Sequence: Synthetic peptide
VTRSSDDVTYYADSVKG

SEQ ID NO: 1358 - protein, 19 aa, Artificial Sequence
  Description of Artificial Sequence: Synthetic peptide
KPVPITRYSFPQIGEEYDY

SEQ ID NO: 1359 - protein, 7 aa, Artificial Sequence
  Description of Artificial Sequence: Synthetic peptide
GFTFRTY

SEQ ID NO: 1360 - protein, 6 aa, Artificial Sequence
  Description of Artificial Sequence: Synthetic peptide
RSSDDV

SEQ ID NO: 1361 - protein, 18 aa, Artificial Sequence
  Description of Artificial Sequence: Synthetic peptide
KPVPITRYSFPQIGEEYD

SEQ ID NO: 1362 - protein, 8 aa, Artificial Sequence
  Description of Artificial Sequence: Synthetic peptide
GFTFRTYY

SEQ ID NO: 1363 - protein, 8 aa, Artificial Sequence
  Description of Artificial Sequence: Synthetic peptide
TRSSDDVT

SEQ ID NO: 1364 - protein, 21 aa, Artificial Sequence
  Description of Artificial Sequence: Synthetic peptide
AAKPVPITRYSFPQIGEEYDY

SEQ ID NO: 1365 - protein, 6 aa, Artificial Sequence
  Description of Artificial Sequence: Synthetic peptide
RTYYMG

SEQ ID NO: 1366 - protein, 13 aa, Artificial Sequence
  Description of Artificial Sequence: Synthetic peptide
FVGVTRSSDDVTY

SEQ ID NO: 1367 - protein, 20 aa, Artificial Sequence
  Description of Artificial Sequence: Synthetic peptide
AAKPVPITRYSFPQIGEEYD

SEQ ID NO: 1368 - protein, 10 aa, Artificial Sequence
  Description of Artificial Sequence: Synthetic peptide
GRTINGYVMG

SEQ ID NO: 1369 - protein, 10 aa, Artificial Sequence
  Description of Artificial Sequence: Synthetic peptide
RIDWSGSSTD

SEQ ID NO: 1370 - protein, 15 aa, Artificial Sequence
  Description of Artificial Sequence: Synthetic peptide
SAYYSGYVTHRDFGS

SEQ ID NO: 1371 - protein, 5 aa, Artificial Sequence
  Description of Artificial Sequence: Synthetic peptide
GYVMG

SEQ ID NO: 1372 - protein, 17 aa, Artificial Sequence
  Description of Artificial Sequence: Synthetic peptide
RIDWSGSSTDYADSVKG

SEQ ID NO: 1373 - protein, 15 aa, Artificial Sequence
  Description of Artificial Sequence: Synthetic peptide
SAYYSGYVTHRDFGS

SEQ ID NO: 1374 - protein, 7 aa, Artificial Sequence
  Description of Artificial Sequence: Synthetic peptide
GRTINGY

SEQ ID NO: 1375 - protein, 6 aa, Artificial Sequence
  Description of Artificial Sequence: Synthetic peptide
DWSGSS

SEQ ID NO: 1376 - protein, 14 aa, Artificial Sequence
  Description of Artificial Sequence: Synthetic peptide
SAYYSGYVTHRDFG

SEQ ID NO: 1377 - protein, 8 aa, Artificial Sequence
  Description of Artificial Sequence: Synthetic peptide
GRTINGYV

SEQ ID NO: 1378 - protein, 8 aa, Artificial Sequence
  Description of Artificial Sequence: Synthetic peptide
IDWSGSST

SEQ ID NO: 1379 - protein, 17 aa, Artificial Sequence
  Description of Artificial Sequence: Synthetic peptide
AGSAYYSGYVTHRDFGS

SEQ ID NO: 1380 - protein, 6 aa, Artificial Sequence
  Description of Artificial Sequence: Synthetic peptide
NGYVMG

SEQ ID NO: 1381 - protein, 13 aa, Artificial Sequence
  Description of Artificial Sequence: Synthetic peptide
FVARIDWSGSSTD

SEQ ID NO: 1382 - protein, 16 aa, Artificial Sequence
  Description of Artificial Sequence: Synthetic peptide
AGSAYYSGYVTHRDFG

SEQ ID NO: 1383 - protein, 12 aa, Artificial Sequence
  Description of Artificial Sequence: Synthetic peptide
GSGRTFTSYTMG

SEQ ID NO: 1384 - protein, 13 aa, Artificial Sequence
  Description of Artificial Sequence: Synthetic peptide
ALTWADDSTYYKY

SEQ ID NO: 1385 - protein, 17 aa, Artificial Sequence
  Description of Artificial Sequence: Synthetic peptide
TGRGLTYDPRDRRKYDY

SEQ ID NO: 1386 - protein, 7 aa, Artificial Sequence
  Description of Artificial Sequence: Synthetic peptide
FTSYTMG

SEQ ID NO: 1387 - protein, 20 aa, Artificial Sequence
  Description of Artificial Sequence: Synthetic peptide
ALTWADDSTYYKYYADSMKG

SEQ ID NO: 1388 - protein, 17 aa, Artificial Sequence
  Description of Artificial Sequence: Synthetic peptide
TGRGLTYDPRDRRKYDY

SEQ ID NO: 1389 - protein, 9 aa, Artificial Sequence
  Description of Artificial Sequence: Synthetic peptide
GSGRTFTSY

SEQ ID NO: 1390 - protein, 9 aa, Artificial Sequence
  Description of Artificial Sequence: Synthetic peptide
TWADDSTYY

SEQ ID NO: 1391 - protein, 16 aa, Artificial Sequence
  Description of Artificial Sequence: Synthetic peptide
TGRGLTYDPRDRRKYD

SEQ ID NO: 1392 - protein, 10 aa, Artificial Sequence
  Description of Artificial Sequence: Synthetic peptide
GSGRTFTSYT

SEQ ID NO: 1393 - protein, 11 aa, Artificial Sequence
  Description of Artificial Sequence: Synthetic peptide
LTWADDSTYYK

SEQ ID NO: 1394 - protein, 19 aa, Artificial Sequence
  Description of Artificial Sequence: Synthetic peptide
VATGRGLTYDPRDRRKYDY

SEQ ID NO: 1395 - protein, 8 aa, Artificial Sequence
  Description of Artificial Sequence: Synthetic peptide
TFTSYTMG

SEQ ID NO: 1396 - protein, 16 aa, Artificial Sequence
  Description of Artificial Sequence: Synthetic peptide
FVSALTWADDSTYYKY

SEQ ID NO: 1397 - protein, 18 aa, Artificial Sequence
  Description of Artificial Sequence: Synthetic peptide
VATGRGLTYDPRDRRKYD

SEQ ID NO: 1398 - protein, 10 aa, Artificial Sequence
  Description of Artificial Sequence: Synthetic peptide
GRTINTYVTG

SEQ ID NO: 1399 - protein, 10 aa, Artificial Sequence
  Description of Artificial Sequence: Synthetic peptide
RIDWSGSSTD

SEQ ID NO: 1400 - protein, 15 aa, Artificial Sequence
  Description of Artificial Sequence: Synthetic peptide
SAYYSGYVTHRDFGS

SEQ ID NO: 1401 - protein, 5 aa, Artificial Sequence
  Description of Artificial Sequence: Synthetic peptide
TYVTG

SEQ ID NO: 1402 - protein, 17 aa, Artificial Sequence
  Description of Artificial Sequence: Synthetic peptide
RIDWSGSSTDYADSVKG

SEQ ID NO: 1403 - protein, 15 aa, Artificial Sequence
  Description of Artificial Sequence: Synthetic peptide
SAYYSGYVTHRDFGS

SEQ ID NO: 1404 - protein, 7 aa, Artificial Sequence
  Description of Artificial Sequence: Synthetic peptide
GRTINTY

SEQ ID NO: 1405 - protein, 6 aa, Artificial Sequence
  Description of Artificial Sequence: Synthetic peptide
DWSGSS

SEQ ID NO: 1406 - protein, 14 aa, Artificial Sequence
  Description of Artificial Sequence: Synthetic peptide
SAYYSGYVTHRDFG

SEQ ID NO: 1407 - protein, 8 aa, Artificial Sequence
  Description of Artificial Sequence: Synthetic peptide
GRTINTYV

SEQ ID NO: 1408 - protein, 8 aa, Artificial Sequence
  Description of Artificial Sequence: Synthetic peptide
IDWSGSST

SEQ ID NO: 1409 - protein, 17 aa, Artificial Sequence
  Description of Artificial Sequence: Synthetic peptide
AGSAYYSGYVTHRDFGS

SEQ ID NO: 1410 - protein, 6 aa, Artificial Sequence
  Description of Artificial Sequence: Synthetic peptide
NTYVTG

SEQ ID NO: 1411 - protein, 13 aa, Artificial Sequence
  Description of Artificial Sequence: Synthetic peptide
FVARIDWSGSSTD

SEQ ID NO: 1412 - protein, 16 aa, Artificial Sequence
  Description of Artificial Sequence: Synthetic peptide
AGSAYYSGYVTHRDFG

SEQ ID NO: 1413 - protein, 10 aa, Artificial Sequence
  Description of Artificial Sequence: Synthetic peptide
GRTFTTYGMG

SEQ ID NO: 1414 - protein, 12 aa, Artificial Sequence
  Description of Artificial Sequence: Synthetic peptide
TITWSGSTNYKY

SEQ ID NO: 1415 - protein, 15 aa, Artificial Sequence
  Description of Artificial Sequence: Synthetic peptide
STVLTDPRRLNEYDY

SEQ ID NO: 1416 - protein, 5 aa, Artificial Sequence
  Description of Artificial Sequence: Synthetic peptide
TYGMG

SEQ ID NO: 1417 - protein, 19 aa, Artificial Sequence
  Description of Artificial Sequence: Synthetic peptide
TITWSGSTNYKYYTDSVKG

SEQ ID NO: 1418 - protein, 15 aa, Artificial Sequence
  Description of Artificial Sequence: Synthetic peptide
STVLTDPRRLNEYDY

SEQ ID NO: 1419 - protein, 7 aa, Artificial Sequence
  Description of Artificial Sequence: Synthetic peptide
GRTFTTY

SEQ ID NO: 1420 - protein, 8 aa, Artificial Sequence
  Description of Artificial Sequence: Synthetic peptide
TWSGSTNY

SEQ ID NO: 1421 - protein, 14 aa, Artificial Sequence
  Description of Artificial Sequence: Synthetic peptide
STVLTDPRRLNEYD

SEQ ID NO: 1422 - protein, 8 aa, Artificial Sequence
  Description of Artificial Sequence: Synthetic peptide
GRTFTTYG

SEQ ID NO: 1423 - protein, 10 aa, Artificial Sequence
  Description of Artificial Sequence: Synthetic peptide
ITWSGSTNYK

SEQ ID NO: 1424 - protein, 17 aa, Artificial Sequence
  Description of Artificial Sequence: Synthetic peptide
AASTVLTDPRRLNEYDY

SEQ ID NO: 1425 - protein, 6 aa, Artificial Sequence
  Description of Artificial Sequence: Synthetic peptide
TTYGMG

SEQ ID NO: 1426 - protein, 15 aa, Artificial Sequence
  Description of Artificial Sequence: Synthetic peptide
FVATITWSGSTNYKY

SEQ ID NO: 1427 - protein, 16 aa, Artificial Sequence
  Description of Artificial Sequence: Synthetic peptide
AASTVLTDPRRLNEYD

SEQ ID NO: 1428 - protein, 10 aa, Artificial Sequence
  Description of Artificial Sequence: Synthetic peptide
GRTRTTYGMG

SEQ ID NO: 1429 - protein, 12 aa, Artificial Sequence
  Description of Artificial Sequence: Synthetic peptide
TITWSGPTNYKY

SEQ ID NO: 1430 - protein, 15 aa, Artificial Sequence
  Description of Artificial Sequence: Synthetic peptide
STVLTDPRVPTEYDY

SEQ ID NO: 1431 - protein, 5 aa, Artificial Sequence
  Description of Artificial Sequence: Synthetic peptide
TYGMG

SEQ ID NO: 1432 - protein, 19 aa, Artificial Sequence
  Description of Artificial Sequence: Synthetic peptide
TITWSGPTNYKYYADSVKG

SEQ ID NO: 1433 - protein, 15 aa, Artificial Sequence
  Description of Artificial Sequence: Synthetic peptide
STVLTDPRVPTEYDY

SEQ ID NO: 1434 - protein, 7 aa, Artificial Sequence
  Description of Artificial Sequence: Synthetic peptide
GRTRTTY

SEQ ID NO: 1435 - protein, 8 aa, Artificial Sequence
  Description of Artificial Sequence: Synthetic peptide
TWSGPTNY

SEQ ID NO: 1436 - protein, 14 aa, Artificial Sequence
  Description of Artificial Sequence: Synthetic peptide
STVLTDPRVPTEYD

SEQ ID NO: 1437 - protein, 8 aa, Artificial Sequence
  Description of Artificial Sequence: Synthetic peptide
GRTRTTYG

SEQ ID NO: 1438 - protein, 10 aa, Artificial Sequence
  Description of Artificial Sequence: Synthetic peptide
ITWSGPTNYK

SEQ ID NO: 1439 - protein, 17 aa, Artificial Sequence
  Description of Artificial Sequence: Synthetic peptide
AASTVLTDPRVPTEYDY

SEQ ID NO: 1440 - protein, 6 aa, Artificial Sequence
  Description of Artificial Sequence: Synthetic peptide
TTYGMG

SEQ ID NO: 1441 - protein, 15 aa, Artificial Sequence
  Description of Artificial Sequence: Synthetic peptide
FVTTITWSGPTNYKY

SEQ ID NO: 1442 - protein, 16 aa, Artificial Sequence
  Description of Artificial Sequence: Synthetic peptide
AASTVLTDPRVPTEYD

SEQ ID NO: 1443 - protein, 10 aa, Artificial Sequence
  Description of Artificial Sequence: Synthetic peptide
GRTFPTYAMG

SEQ ID NO: 1444 - protein, 12 aa, Artificial Sequence
  Description of Artificial Sequence: Synthetic peptide
TIRWSGSTQYKY

SEQ ID NO: 1445 - protein, 15 aa, Artificial Sequence
  Description of Artificial Sequence: Synthetic peptide
TTLLGDPRALNEYAY

SEQ ID NO: 1446 - protein, 5 aa, Artificial Sequence
  Description of Artificial Sequence: Synthetic peptide
TYAMG

SEQ ID NO: 1447 - protein, 19 aa, Artificial Sequence
  Description of Artificial Sequence: Synthetic peptide
TIRWSGSTQYKYYADFVKG

SEQ ID NO: 1448 - protein, 15 aa, Artificial Sequence
  Description of Artificial Sequence: Synthetic peptide
TTLLGDPRALNEYAY

SEQ ID NO: 1449 - protein, 7 aa, Artificial Sequence
  Description of Artificial Sequence: Synthetic peptide
GRTFPTY

SEQ ID NO: 1450 - protein, 8 aa, Artificial Sequence
  Description of Artificial Sequence: Synthetic peptide
RWSGSTQY

SEQ ID NO: 1451 - protein, 14 aa, Artificial Sequence
  Description of Artificial Sequence: Synthetic peptide
TTLLGDPRALNEYA

SEQ ID NO: 1452 - protein, 8 aa, Artificial Sequence
  Description of Artificial Sequence: Synthetic peptide
GRTFPTYA

SEQ ID NO: 1453 - protein, 10 aa, Artificial Sequence
  Description of Artificial Sequence: Synthetic peptide
IRWSGSTQYK

SEQ ID NO: 1454 - protein, 17 aa, Artificial Sequence
  Description of Artificial Sequence: Synthetic peptide
AATTLLGDPRALNEYAY

SEQ ID NO: 1455 - protein, 6 aa, Artificial Sequence
  Description of Artificial Sequence: Synthetic peptide
PTYAMG

SEQ ID NO: 1456 - protein, 15 aa, Artificial Sequence
  Description of Artificial Sequence: Synthetic peptide
FVATIRWSGSTQYKY

SEQ ID NO: 1457 - protein, 16 aa, Artificial Sequence
  Description of Artificial Sequence: Synthetic peptide
AATTLLGDPRALNEYA

SEQ ID NO: 1458 - protein, 10 aa, Artificial Sequence
  Description of Artificial Sequence: Synthetic peptide
GRTFSSYAMG

SEQ ID NO: 1459 - protein, 10 aa, Artificial Sequence
  Description of Artificial Sequence: Synthetic peptide
VITWNGGSTH

SEQ ID NO: 1460 - protein, 7 aa, Artificial Sequence
  Description of Artificial Sequence: Synthetic peptide
DPMNSPY

SEQ ID NO: 1461 - protein, 5 aa, Artificial Sequence
  Description of Artificial Sequence: Synthetic peptide
SYAMG

SEQ ID NO: 1462 - protein, 17 aa, Artificial Sequence
  Description of Artificial Sequence: Synthetic peptide
VITWNGGSTHYADSVKG

SEQ ID NO: 1463 - protein, 7 aa, Artificial Sequence
  Description of Artificial Sequence: Synthetic peptide
DPMNSPY

SEQ ID NO: 1464 - protein, 7 aa, Artificial Sequence
  Description of Artificial Sequence: Synthetic peptide
GRTFSSY

SEQ ID NO: 1465 - protein, 6 aa, Artificial Sequence
  Description of Artificial Sequence: Synthetic peptide
TWNGGS

SEQ ID NO: 1466 - protein, 6 aa, Artificial Sequence
  Description of Artificial Sequence: Synthetic peptide
DPMNSP

SEQ ID NO: 1467 - protein, 8 aa, Artificial Sequence
  Description of Artificial Sequence: Synthetic peptide
GRTFSSYA

SEQ ID NO: 1468 - protein, 8 aa, Artificial Sequence
  Description of Artificial Sequence: Synthetic peptide
ITWNGGST

SEQ ID NO: 1469 - protein, 9 aa, Artificial Sequence
  Description of Artificial Sequence: Synthetic peptide
AADPMNSPY

SEQ ID NO: 1470 - protein, 6 aa, Artificial Sequence
  Description of Artificial Sequence: Synthetic peptide
SSYAMG

SEQ ID NO: 1471 - protein, 13 aa, Artificial Sequence
  Description of Artificial Sequence: Synthetic peptide
FAAVITWNGGSTH

SEQ ID NO: 1472 - protein, 8 aa, Artificial Sequence
  Description of Artificial Sequence: Synthetic peptide
AADPMNSP

SEQ ID NO: 1473 - protein, 10 aa, Artificial Sequence
  Description of Artificial Sequence: Synthetic peptide
GRAFSDLRMA

SEQ ID NO: 1474 - protein, 10 aa, Artificial Sequence
  Description of Artificial Sequence: Synthetic peptide
AVEWRGSSRY

SEQ ID NO: 1475 - protein, 16 aa, Artificial Sequence
  Description of Artificial Sequence: Synthetic peptide
VSPVVGDPRNSDTYNY

SEQ ID NO: 1476 - protein, 5 aa, Artificial Sequence
  Description of Artificial Sequence: Synthetic peptide
DLRMA

SEQ ID NO: 1477 - protein, 19 aa, Artificial Sequence
  Description of Artificial Sequence: Synthetic peptide
AVEWRGSSRYYYSADSVKG

SEQ ID NO: 1478 - protein, 16 aa, Artificial Sequence
  Description of Artificial Sequence: Synthetic peptide
VSPVVGDPRNSDTYNY

SEQ ID NO: 1479 - protein, 7 aa, Artificial Sequence
  Description of Artificial Sequence: Synthetic peptide
GRAFSDL

SEQ ID NO: 1480 - protein, 6 aa, Artificial Sequence
  Description of Artificial Sequence: Synthetic peptide
EWRGSS

SEQ ID NO: 1481 - protein, 15 aa, Artificial Sequence
  Description of Artificial Sequence: Synthetic peptide
VSPVVGDPRNSDTYN

SEQ ID NO: 1482 - protein, 8 aa, Artificial Sequence
  Description of Artificial Sequence: Synthetic peptide
GRAFSDLR

SEQ ID NO: 1483 - protein, 8 aa, Artificial Sequence
  Description of Artificial Sequence: Synthetic peptide
VEWRGSSR

SEQ ID NO: 1484 - protein, 18 aa, Artificial Sequence
  Description of Artificial Sequence: Synthetic peptide
AAVSPVVGDPRNSDTYNY

SEQ ID NO: 1485 - protein, 6 aa, Artificial Sequence
  Description of Artificial Sequence: Synthetic peptide
SDLRMA

SEQ ID NO: 1486 - protein, 13 aa, Artificial Sequence
  Description of Artificial Sequence: Synthetic peptide
FVAAVEWRGSSRY

SEQ ID NO: 1487 - protein, 17 aa, Artificial Sequence
  Description of Artificial Sequence: Synthetic peptide
AAVSPVVGDPRNSDTYN

SEQ ID NO: 1488 - protein, 10 aa, Artificial Sequence
  Description of Artificial Sequence: Synthetic peptide
GRTFSPYGMG

SEQ ID NO: 1489 - protein, 10 aa, Artificial Sequence
  Description of Artificial Sequence: Synthetic peptide
AVDWNDGSTY

SEQ ID NO: 1490 - protein, 16 aa, Artificial Sequence
  Description of Artificial Sequence: Synthetic peptide
DLTGWGLDADVSEYDY

SEQ ID NO: 1491 - protein, 5 aa, Artificial Sequence
  Description of Artificial Sequence: Synthetic peptide
PYGMG

SEQ ID NO: 1492 - protein, 17 aa, Artificial Sequence
  Description of Artificial Sequence: Synthetic peptide
AVDWNDGSTYYSDSVKG

SEQ ID NO: 1493 - protein, 16 aa, Artificial Sequence
  Description of Artificial Sequence: Synthetic peptide
DLTGWGLDADVSEYDY

SEQ ID NO: 1494 - protein, 7 aa, Artificial Sequence
  Description of Artificial Sequence: Synthetic peptide
GRTFSPY

SEQ ID NO: 1495 - protein, 6 aa, Artificial Sequence
  Description of Artificial Sequence: Synthetic peptide
DWNDGS

SEQ ID NO: 1496 - protein, 15 aa, Artificial Sequence
  Description of Artificial Sequence: Synthetic peptide
DLTGWGLDADVSEYD

SEQ ID NO: 1497 - protein, 8 aa, Artificial Sequence
  Description of Artificial Sequence: Synthetic peptide
GRTFSPYG

SEQ ID NO: 1498 - protein, 8 aa, Artificial Sequence
  Description of Artificial Sequence: Synthetic peptide
VDWNDGST

SEQ ID NO: 1499 - protein, 18 aa, Artificial Sequence
  Description of Artificial Sequence: Synthetic peptide
AADLTGWGLDADVSEYDY

SEQ ID NO: 1500 - protein, 6 aa, Artificial Sequence
  Description of Artificial Sequence: Synthetic peptide
SPYGMG

SEQ ID NO: 1501 - protein, 13 aa, Artificial Sequence
  Description of Artificial Sequence: Synthetic peptide
FVAAVDWNDGSTY

SEQ ID NO: 1502 - protein, 17 aa, Artificial Sequence
  Description of Artificial Sequence: Synthetic peptide
AADLTGWGLDADVSEYD

SEQ ID NO: 1503 - protein, 10 aa, Artificial Sequence
  Description of Artificial Sequence: Synthetic peptide
GLPFSSSRMG

SEQ ID NO: 1504 - protein, 12 aa, Artificial Sequence
  Description of Artificial Sequence: Synthetic peptide
AIGWSGRSTYRY

SEQ ID NO: 1505 - protein, 16 aa, Artificial Sequence
  Description of Artificial Sequence: Synthetic peptide
DPNYYGDVRTSGTYQY

SEQ ID NO: 1506 - protein, 5 aa, Artificial Sequence
  Description of Artificial Sequence: Synthetic peptide
SSRMG

SEQ ID NO: 1507 - protein, 19 aa, Artificial Sequence
  Description of Artificial Sequence: Synthetic peptide
AIGWSGRSTYRYYDDSVKG

SEQ ID NO: 1508 - protein, 16 aa, Artificial Sequence
  Description of Artificial Sequence: Synthetic peptide
DPNYYGDVRTSGTYQY

SEQ ID NO: 1509 - protein, 7 aa, Artificial Sequence
  Description of Artificial Sequence: Synthetic peptide
GLPFSSS

SEQ ID NO: 1510 - protein, 8 aa, Artificial Sequence
  Description of Artificial Sequence: Synthetic peptide
GWSGRSTY

SEQ ID NO: 1511 - protein, 15 aa, Artificial Sequence
  Description of Artificial Sequence: Synthetic peptide
DPNYYGDVRTSGTYQ

SEQ ID NO: 1512 - protein, 8 aa, Artificial Sequence
  Description of Artificial Sequence: Synthetic peptide
GLPFSSSR

SEQ ID NO: 1513 - protein, 10 aa, Artificial Sequence
  Description of Artificial Sequence: Synthetic peptide
IGWSGRSTYR

SEQ ID NO: 1514 - protein, 18 aa, Artificial Sequence
  Description of Artificial Sequence: Synthetic peptide
AADPNYYGDVRTSGTYQY

SEQ ID NO: 1515 - protein, 6 aa, Artificial Sequence
  Description of Artificial Sequence: Synthetic peptide
SSSRMG

SEQ ID NO: 1516 - protein, 15 aa, Artificial Sequence
  Description of Artificial Sequence: Synthetic peptide
FVAAIGWSGRSTYRY

SEQ ID NO: 1517 - protein, 17 aa, Artificial Sequence
  Description of Artificial Sequence: Synthetic peptide
AADPNYYGDVRTSGTYQ

SEQ ID NO: 1518 - protein, 10 aa, Artificial Sequence
  Description of Artificial Sequence: Synthetic peptide
GDTFSNYAMG

SEQ ID NO: 1519 - protein, 10 aa, Artificial Sequence
  Description of Artificial Sequence: Synthetic peptide
DISWYSANIG

SEQ ID NO: 1520 - protein, 11 aa, Artificial Sequence
  Description of Artificial Sequence: Synthetic peptide
DRNHWPVKGDY

SEQ ID NO: 1521 - protein, 5 aa, Artificial Sequence
  Description of Artificial Sequence: Synthetic peptide
NYAMG

SEQ ID NO: 1522 - protein, 17 aa, Artificial Sequence
  Description of Artificial Sequence: Synthetic peptide
DISWYSANIGYADSVKG

SEQ ID NO: 1523 - protein, 11 aa, Artificial Sequence
  Description of Artificial Sequence: Synthetic peptide
DRNHWPVKGDY

SEQ ID NO: 1524 - protein, 7 aa, Artificial Sequence
  Description of Artificial Sequence: Synthetic peptide
GDTFSNY

SEQ ID NO: 1525 - protein, 6 aa, Artificial Sequence
  Description of Artificial Sequence: Synthetic peptide
SWYSAN

SEQ ID NO: 1526 - protein, 10 aa, Artificial Sequence
  Description of Artificial Sequence: Synthetic peptide
DRNHWPVKGD

SEQ ID NO: 1527 - protein, 8 aa, Artificial Sequence
  Description of Artificial Sequence: Synthetic peptide
GDTFSNYA

SEQ ID NO: 1528 - protein, 8 aa, Artificial Sequence
  Description of Artificial Sequence: Synthetic peptide
ISWYSANI

SEQ ID NO: 1529 - protein, 13 aa, Artificial Sequence
  Description of Artificial Sequence: Synthetic peptide
AADRNHWPVKGDY

SEQ ID NO: 1530 - protein, 6 aa, Artificial Sequence
  Description of Artificial Sequence: Synthetic peptide
SNYAMG

SEQ ID NO: 1531 - protein, 13 aa, Artificial Sequence
  Description of Artificial Sequence: Synthetic peptide
FVADISWYSANIG

SEQ ID NO: 1532 - protein, 12 aa, Artificial Sequence
  Description of Artificial Sequence: Synthetic peptide
AADRNHWPVKGD

SEQ ID NO: 1533 - protein, 10 aa, Artificial Sequence
  Description of Artificial Sequence: Synthetic peptide
GRAFSQYTMG

SEQ ID NO: 1534 - protein, 12 aa, Artificial Sequence
  Description of Artificial Sequence: Synthetic peptide
AIRWSGGSIYKY

SEQ ID NO: 1535 - protein, 15 aa, Artificial Sequence
  Description of Artificial Sequence: Synthetic peptide
RMSPWGDPRGNEYDY

SEQ ID NO: 1536 - protein, 5 aa, Artificial Sequence
  Description of Artificial Sequence: Synthetic peptide
QYTMG

SEQ ID NO: 1537 - protein, 19 aa, Artificial Sequence
  Description of Artificial Sequence: Synthetic peptide
AIRWSGGSIYKYYADSVKG

SEQ ID NO: 1538 - protein, 15 aa, Artificial Sequence
  Description of Artificial Sequence: Synthetic peptide
RMSPWGDPRGNEYDY

SEQ ID NO: 1539 - protein, 7 aa, Artificial Sequence
  Description of Artificial Sequence: Synthetic peptide
GRAFSQY

SEQ ID NO: 1540 - protein, 8 aa, Artificial Sequence
  Description of Artificial Sequence: Synthetic peptide
RWSGGSIY

SEQ ID NO: 1541 - protein, 14 aa, Artificial Sequence
  Description of Artificial Sequence: Synthetic peptide
RMSPWGDPRGNEYD

SEQ ID NO: 1542 - protein, 8 aa, Artificial Sequence
  Description of Artificial Sequence: Synthetic peptide
GRAFSQYT

SEQ ID NO: 1543 - protein, 10 aa, Artificial Sequence
  Description of Artificial Sequence: Synthetic peptide
IRWSGGSIYK

SEQ ID NO: 1544 - protein, 17 aa, Artificial Sequence
  Description of Artificial Sequence: Synthetic peptide
AARMSPWGDPRGNEYDY

SEQ ID NO: 1545 - protein, 6 aa, Artificial Sequence
  Description of Artificial Sequence: Synthetic peptide
SQYTMG

SEQ ID NO: 1546 - protein, 15 aa, Artificial Sequence
  Description of Artificial Sequence: Synthetic peptide
FVTAIRWSGGSIYKY

SEQ ID NO: 1547 - protein, 16 aa, Artificial Sequence
  Description of Artificial Sequence: Synthetic peptide
AARMSPWGDPRGNEYD

SEQ ID NO: 1548 - protein, 10 aa, Artificial Sequence
  Description of Artificial Sequence: Synthetic peptide
GRTSSISTMG

SEQ ID NO: 1549 - protein, 12 aa, Artificial Sequence
  Description of Artificial Sequence: Synthetic peptide
AIRWSGSSSYKY

SEQ ID NO: 1550 - protein, 15 aa, Artificial Sequence
  Description of Artificial Sequence: Synthetic peptide
QMSLWRDPREIDYDY

SEQ ID NO: 1551 - protein, 5 aa, Artificial Sequence
  Description of Artificial Sequence: Synthetic peptide
ISTMG

SEQ ID NO: 1552 - protein, 19 aa, Artificial Sequence
  Description of Artificial Sequence: Synthetic peptide
AIRWSGSSSYKYYADSVKG

SEQ ID NO: 1553 - protein, 15 aa, Artificial Sequence
  Description of Artificial Sequence: Synthetic peptide
QMSLWRDPREIDYDY

SEQ ID NO: 1554 - protein, 7 aa, Artificial Sequence
  Description of Artificial Sequence: Synthetic peptide
GRTSSIS

SEQ ID NO: 1555 - protein, 8 aa, Artificial Sequence
  Description of Artificial Sequence: Synthetic peptide
RWSGSSSY

SEQ ID NO: 1556 - protein, 14 aa, Artificial Sequence
  Description of Artificial Sequence: Synthetic peptide
QMSLWRDPREIDYD

SEQ ID NO: 1557 - protein, 8 aa, Artificial Sequence
  Description of Artificial Sequence: Synthetic peptide
GRTSSIST

SEQ ID NO: 1558 - protein, 10 aa, Artificial Sequence
  Description of Artificial Sequence: Synthetic peptide
IRWSGSSSYK

SEQ ID NO: 1559 - protein, 17 aa, Artificial Sequence
  Description of Artificial Sequence: Synthetic peptide
AAQMSLWRDPREIDYDY

SEQ ID NO: 1560 - protein, 6 aa, Artificial Sequence
  Description of Artificial Sequence: Synthetic peptide
SISTMG

SEQ ID NO: 1561 - protein, 15 aa, Artificial Sequence
  Description of Artificial Sequence: Synthetic peptide
FVTAIRWSGSSSYKY

SEQ ID NO: 1562 - protein, 16 aa, Artificial Sequence
  Description of Artificial Sequence: Synthetic peptide
AAQMSLWRDPREIDYD

SEQ ID NO: 1563 - protein, 10 aa, Artificial Sequence
  Description of Artificial Sequence: Synthetic peptide
GLPGSSSRMA

SEQ ID NO: 1564 - protein, 12 aa, Artificial Sequence
  Description of Artificial Sequence: Synthetic peptide
AIAWRGRTSYKY

SEQ ID NO: 1565 - protein, 16 aa, Artificial Sequence
  Description of Artificial Sequence: Synthetic peptide
HPNDDGDPRISGNYQY

SEQ ID NO: 1566 - protein, 5 aa, Artificial Sequence
  Description of Artificial Sequence: Synthetic peptide
SSRMA

SEQ ID NO: 1567 - protein, 19 aa, Artificial Sequence
  Description of Artificial Sequence: Synthetic peptide
AIAWRGRTSYKYYSDSVKG

SEQ ID NO: 1568 - protein, 16 aa, Artificial Sequence
  Description of Artificial Sequence: Synthetic peptide
HPNDDGDPRISGNYQY

SEQ ID NO: 1569 - protein, 7 aa, Artificial Sequence
  Description of Artificial Sequence: Synthetic peptide
GLPGSSS

SEQ ID NO: 1570 - protein, 8 aa, Artificial Sequence
  Description of Artificial Sequence: Synthetic peptide
AWRGRTSY

SEQ ID NO: 1571 - protein, 15 aa, Artificial Sequence
  Description of Artificial Sequence: Synthetic peptide
HPNDDGDPRISGNYQ

SEQ ID NO: 1572 - protein, 8 aa, Artificial Sequence
  Description of Artificial Sequence: Synthetic peptide
GLPGSSSR

SEQ ID NO: 1573 - protein, 10 aa, Artificial Sequence
  Description of Artificial Sequence: Synthetic peptide
IAWRGRTSYK

SEQ ID NO: 1574 - protein, 18 aa, Artificial Sequence
  Description of Artificial Sequence: Synthetic peptide
AAHPNDDGDPRISGNYQY

SEQ ID NO: 1575 - protein, 6 aa, Artificial Sequence
  Description of Artificial Sequence: Synthetic peptide
SSSRMA

SEQ ID NO: 1576 - protein, 15 aa, Artificial Sequence
  Description of Artificial Sequence: Synthetic peptide
FVAAIAWRGRTSYKY

SEQ ID NO: 1577 - protein, 17 aa, Artificial Sequence
  Description of Artificial Sequence: Synthetic peptide
AAHPNDDGDPRISGNYQ

SEQ ID NO: 1578 - protein, 10 aa, Artificial Sequence
  Description of Artificial Sequence: Synthetic peptide
GRTFSSYAMG

SEQ ID NO: 1579 - protein, 12 aa, Artificial Sequence
  Description of Artificial Sequence: Synthetic peptide
AIHWNGASTYRY

SEQ ID NO: 1580 - protein, 17 aa, Artificial Sequence
  Description of Artificial Sequence: Synthetic peptide
SPPPTVGDVRDPANYDS

SEQ ID NO: 1581 - protein, 5 aa, Artificial Sequence
  Description of Artificial Sequence: Synthetic peptide
SYAMG

SEQ ID NO: 1582 - protein, 19 aa, Artificial Sequence
  Description of Artificial Sequence: Synthetic peptide
AIHWNGASTYRYSADSVKG

SEQ ID NO: 1583 - protein, 17 aa, Artificial Sequence
  Description of Artificial Sequence: Synthetic peptide
SPPPTVGDVRDPANYDS

SEQ ID NO: 1584 - protein, 7 aa, Artificial Sequence
  Description of Artificial Sequence: Synthetic peptide
GRTFSSY

SEQ ID NO: 1585 - protein, 8 aa, Artificial Sequence
  Description of Artificial Sequence: Synthetic peptide
HWNGASTY

SEQ ID NO: 1586 - protein, 16 aa, Artificial Sequence
  Description of Artificial Sequence: Synthetic peptide
SPPPTVGDVRDPANYD

SEQ ID NO: 1587 - protein, 8 aa, Artificial Sequence
  Description of Artificial Sequence: Synthetic peptide
GRTFSSYA

SEQ ID NO: 1588 - protein, 10 aa, Artificial Sequence
  Description of Artificial Sequence: Synthetic peptide
IHWNGASTYR

SEQ ID NO: 1589 - protein, 19 aa, Artificial Sequence
  Description of Artificial Sequence: Synthetic peptide
AASPPPTVGDVRDPANYDS

SEQ ID NO: 1590 - protein, 6 aa, Artificial Sequence
  Description of Artificial Sequence: Synthetic peptide
SSYAMG

SEQ ID NO: 1591 - protein, 15 aa, Artificial Sequence
  Description of Artificial Sequence: Synthetic peptide
FVAAIHWNGASTYRY

SEQ ID NO: 1592 - protein, 18 aa, Artificial Sequence
  Description of Artificial Sequence: Synthetic peptide
AASPPPTVGDVRDPANYD

SEQ ID NO: 1593 - protein, 10 aa, Artificial Sequence
  Description of Artificial Sequence: Synthetic peptide
GRTFSRYAMG

SEQ ID NO: 1594 - protein, 10 aa, Artificial Sequence
  Description of Artificial Sequence: Synthetic peptide
AIAWSGGAIY

SEQ ID NO: 1595 - protein, 14 aa, Artificial Sequence
  Description of Artificial Sequence: Synthetic peptide
TRDPRVGDKKFYDY

SEQ ID NO: 1596 - protein, 5 aa, Artificial Sequence
  Description of Artificial Sequence: Synthetic peptide
RYAMG

SEQ ID NO: 1597 - protein, 17 aa, Artificial Sequence
  Description of Artificial Sequence: Synthetic peptide
AIAWSGGAIYYADFVKG

SEQ ID NO: 1598 - protein, 14 aa, Artificial Sequence
  Description of Artificial Sequence: Synthetic peptide
TRDPRVGDKKFYDY

SEQ ID NO: 1599 - protein, 7 aa, Artificial Sequence
  Description of Artificial Sequence: Synthetic peptide
GRTFSRY

SEQ ID NO: 1600 - protein, 6 aa, Artificial Sequence
  Description of Artificial Sequence: Synthetic peptide
AWSGGA

SEQ ID NO: 1601 - protein, 13 aa, Artificial Sequence
  Description of Artificial Sequence: Synthetic peptide
TRDPRVGDKKFYD

SEQ ID NO: 1602 - protein, 8 aa, Artificial Sequence
  Description of Artificial Sequence: Synthetic peptide
GRTFSRYA

SEQ ID NO: 1603 - protein, 8 aa, Artificial Sequence
  Description of Artificial Sequence: Synthetic peptide
IAWSGGAI

SEQ ID NO: 1604 - protein, 16 aa, Artificial Sequence
  Description of Artificial Sequence: Synthetic peptide
GSTRDPRVGDKKFYDY

SEQ ID NO: 1605 - protein, 6 aa, Artificial Sequence
  Description of Artificial Sequence: Synthetic peptide
SRYAMG

SEQ ID NO: 1606 - protein, 13 aa, Artificial Sequence
  Description of Artificial Sequence: Synthetic peptide
FVAAIAWSGGAIY

SEQ ID NO: 1607 - protein, 15 aa, Artificial Sequence
  Description of Artificial Sequence: Synthetic peptide
GSTRDPRVGDKKFYD

SEQ ID NO: 1608 - protein, 10 aa, Artificial Sequence
  Description of Artificial Sequence: Synthetic peptide
GRSFSSYNMG

SEQ ID NO: 1609 - protein, 10 aa, Artificial Sequence
  Description of Artificial Sequence: Synthetic peptide
VVTWSGGGTS

SEQ ID NO: 1610 - protein, 18 aa, Artificial Sequence
  Description of Artificial Sequence: Synthetic peptide
TQDWYGGTRAFRAASFHS

SEQ ID NO: 1611 - protein, 5 aa, Artificial Sequence
  Description of Artificial Sequence: Synthetic peptide
SYNMG

SEQ ID NO: 1612 - protein, 17 aa, Artificial Sequence
  Description of Artificial Sequence: Synthetic peptide
VVTWSGGGTSYADSVKG

SEQ ID NO: 1613 - protein, 18 aa, Artificial Sequence
  Description of Artificial Sequence: Synthetic peptide
TQDWYGGTRAFRAASFHS

SEQ ID NO: 1614 - protein, 7 aa, Artificial Sequence
  Description of Artificial Sequence: Synthetic peptide
GRSFSSY

SEQ ID NO: 1615 - protein, 6 aa, Artificial Sequence
  Description of Artificial Sequence: Synthetic peptide
TWSGGG

SEQ ID NO: 1616 - protein, 17 aa, Artificial Sequence
  Description of Artificial Sequence: Synthetic peptide
TQDWYGGTRAFRAASFH

SEQ ID NO: 1617 - protein, 8 aa, Artificial Sequence
  Description of Artificial Sequence: Synthetic peptide
GRSFSSYN

SEQ ID NO: 1618 - protein, 8 aa, Artificial Sequence
  Description of Artificial Sequence: Synthetic peptide
VTWSGGGT

SEQ ID NO: 1619 - protein, 20 aa, Artificial Sequence
  Description of Artificial Sequence: Synthetic peptide
AATQDWYGGTRAFRAASFHS

SEQ ID NO: 1620 - protein, 6 aa, Artificial Sequence
  Description of Artificial Sequence: Synthetic peptide
SSYNMG

SEQ ID NO: 1621 - protein, 13 aa, Artificial Sequence
  Description of Artificial Sequence: Synthetic peptide
LVAVVTWSGGGTS

SEQ ID NO: 1622 - protein, 19 aa, Artificial Sequence
  Description of Artificial Sequence: Synthetic peptide
AATQDWYGGTRAFRAASFH

SEQ ID NO: 1623 - protein, 10 aa, Artificial Sequence
  Description of Artificial Sequence: Synthetic peptide
GTISKIDVMA

SEQ ID NO: 1624 - protein, 9 aa, Artificial Sequence
  Description of Artificial Sequence: Synthetic peptide
RIFSNDVTH

SEQ ID NO: 1625 - protein, 13 aa, Artificial Sequence
  Description of Artificial Sequence: Synthetic peptide
QIWSDMRGRMDTY

SEQ ID NO: 1626 - protein, 5 aa, Artificial Sequence
  Description of Artificial Sequence: Synthetic peptide
IDVMA

SEQ ID NO: 1627 - protein, 16 aa, Artificial Sequence
  Description of Artificial Sequence: Synthetic peptide
RIFSNDVTHYVDSAKG

SEQ ID NO: 1628 - protein, 13 aa, Artificial Sequence
  Description of Artificial Sequence: Synthetic peptide
QIWSDMRGRMDTY

SEQ ID NO: 1629 - protein, 7 aa, Artificial Sequence
  Description of Artificial Sequence: Synthetic peptide
GTISKID

SEQ ID NO: 1630 - protein, 5 aa, Artificial Sequence
  Description of Artificial Sequence: Synthetic peptide
FSNDV

SEQ ID NO: 1631 - protein, 12 aa, Artificial Sequence
  Description of Artificial Sequence: Synthetic peptide
QIWSDMRGRMDT

SEQ ID NO: 1632 - protein, 8 aa, Artificial Sequence
  Description of Artificial Sequence: Synthetic peptide
GTISKIDV

SEQ ID NO: 1633 - protein, 7 aa, Artificial Sequence
  Description of Artificial Sequence: Synthetic peptide
IFSNDVT

SEQ ID NO: 1634 - protein, 15 aa, Artificial Sequence
  Description of Artificial Sequence: Synthetic peptide
NAQIWSDMRGRMDTY

SEQ ID NO: 1635 - protein, 6 aa, Artificial Sequence
  Description of Artificial Sequence: Synthetic peptide
KIDVMA

SEQ ID NO: 1636 - protein, 12 aa, Artificial Sequence
  Description of Artificial Sequence: Synthetic peptide
LVARIFSNDVTH

SEQ ID NO: 1637 - protein, 14 aa, Artificial Sequence
  Description of Artificial Sequence: Synthetic peptide
NAQIWSDMRGRMDT

SEQ ID NO: 1638 - protein, 10 aa, Artificial Sequence
  Description of Artificial Sequence: Synthetic peptide
GRTFDQFTVG

SEQ ID NO: 1639 - protein, 12 aa, Artificial Sequence
  Description of Artificial Sequence: Synthetic peptide
AIRWSGSTTYRY

SEQ ID NO: 1640 - protein, 15 aa, Artificial Sequence
  Description of Artificial Sequence: Synthetic peptide
QMSQWSDPRGDDYDS

SEQ ID NO: 1641 - protein, 5 aa, Artificial Sequence
  Description of Artificial Sequence: Synthetic peptide
QFTVG

SEQ ID NO: 1642 - protein, 19 aa, Artificial Sequence
  Description of Artificial Sequence: Synthetic peptide
AIRWSGSTTYRYYADSVKG

SEQ ID NO: 1643 - protein, 15 aa, Artificial Sequence
  Description of Artificial Sequence: Synthetic peptide
QMSQWSDPRGDDYDS

SEQ ID NO: 1644 - protein, 7 aa, Artificial Sequence
  Description of Artificial Sequence: Synthetic peptide
GRTFDQF

SEQ ID NO: 1645 - protein, 8 aa, Artificial Sequence
  Description of Artificial Sequence: Synthetic peptide
RWSGSTTY

SEQ ID NO: 1646 - protein, 14 aa, Artificial Sequence
  Description of Artificial Sequence: Synthetic peptide
QMSQWSDPRGDDYD

SEQ ID NO: 1647 - protein, 8 aa, Artificial Sequence
  Description of Artificial Sequence: Synthetic peptide
GRTFDQFT

SEQ ID NO: 1648 - protein, 10 aa, Artificial Sequence
  Description of Artificial Sequence: Synthetic peptide
IRWSGSTTYR

SEQ ID NO: 1649 - protein, 17 aa, Artificial Sequence
  Description of Artificial Sequence: Synthetic peptide
AGQMSQWSDPRGDDYDS

SEQ ID NO: 1650 - protein, 6 aa, Artificial Sequence
  Description of Artificial Sequence: Synthetic peptide
DQFTVG

SEQ ID NO: 1651 - protein, 15 aa, Artificial Sequence
  Description of Artificial Sequence: Synthetic peptide
FVTAIRWSGSTTYRY

SEQ ID NO: 1652 - protein, 16 aa, Artificial Sequence
  Description of Artificial Sequence: Synthetic peptide
AGQMSQWSDPRGDDYD

SEQ ID NO: 1653 - protein, 10 aa, Artificial Sequence
  Description of Artificial Sequence: Synthetic peptide
GRTFSPYAMG

SEQ ID NO: 1654 - protein, 12 aa, Artificial Sequence
  Description of Artificial Sequence: Synthetic peptide
AIRWSGATTYKY

SEQ ID NO: 1655 - protein, 19 aa, Artificial Sequence
  Description of Artificial Sequence: Synthetic peptide
DRVPKDISIDPRNPKDWDY

SEQ ID NO: 1656 - protein, 5 aa, Artificial Sequence
  Description of Artificial Sequence: Synthetic peptide
PYAMG

SEQ ID NO: 1657 - protein, 19 aa, Artificial Sequence
  Description of Artificial Sequence: Synthetic peptide
AIRWSGATTYKYVGDSVQG

SEQ ID NO: 1658 - protein, 19 aa, Artificial Sequence
  Description of Artificial Sequence: Synthetic peptide
DRVPKDISIDPRNPKDWDY

SEQ ID NO: 1659 - protein, 7 aa, Artificial Sequence
  Description of Artificial Sequence: Synthetic peptide
GRTFSPY

SEQ ID NO: 1660 - protein, 8 aa, Artificial Sequence
  Description of Artificial Sequence: Synthetic peptide
RWSGATTY

SEQ ID NO: 1661 - protein, 18 aa, Artificial Sequence
  Description of Artificial Sequence: Synthetic peptide
DRVPKDISIDPRNPKDWD

SEQ ID NO: 1662 - protein, 8 aa, Artificial Sequence
  Description of Artificial Sequence: Synthetic peptide
GRTFSPYA

SEQ ID NO: 1663 - protein, 10 aa, Artificial Sequence
  Description of Artificial Sequence: Synthetic peptide
IRWSGATTYK

SEQ ID NO: 1664 - protein, 21 aa, Artificial Sequence
  Description of Artificial Sequence: Synthetic peptide
AADRVPKDISIDPRNPKDWDY

SEQ ID NO: 1665 - protein, 6 aa, Artificial Sequence
  Description of Artificial Sequence: Synthetic peptide
SPYAMG

SEQ ID NO: 1666 - protein, 15 aa, Artificial Sequence
  Description of Artificial Sequence: Synthetic peptide
FVAAIRWSGATTYKY

SEQ ID NO: 1667 - protein, 20 aa, Artificial Sequence
  Description of Artificial Sequence: Synthetic peptide
AADRVPKDISIDPRNPKDWD

SEQ ID NO: 1668 - protein, 10 aa, Artificial Sequence
  Description of Artificial Sequence: Synthetic peptide
GSIASIRDMA

SEQ ID NO: 1669 - protein, 9 aa, Artificial Sequence
  Description of Artificial Sequence: Synthetic peptide
IFARGGTTH

SEQ ID NO: 1670 - protein, 13 aa, Artificial Sequence
  Description of Artificial Sequence: Synthetic peptide
EVATMFQPGFRDY

SEQ ID NO: 1671 - protein, 5 aa, Artificial Sequence
  Description of Artificial Sequence: Synthetic peptide
IRDMA

SEQ ID NO: 1672 - protein, 16 aa, Artificial Sequence
  Description of Artificial Sequence: Synthetic peptide
IFARGGTTHYADSVKG

SEQ ID NO: 1673 - protein, 13 aa, Artificial Sequence
  Description of Artificial Sequence: Synthetic peptide
EVATMFQPGFRDY

SEQ ID NO: 1674 - protein, 7 aa, Artificial Sequence
  Description of Artificial Sequence: Synthetic peptide
GSIASIR

SEQ ID NO: 1675 - protein, 5 aa, Artificial Sequence
  Description of Artificial Sequence: Synthetic peptide
ARGGT

SEQ ID NO: 1676 - protein, 12 aa, Artificial Sequence
  Description of Artificial Sequence: Synthetic peptide
EVATMFQPGFRD

SEQ ID NO: 1677 - protein, 8 aa, Artificial Sequence
  Description of Artificial Sequence: Synthetic peptide
GSIASIRD

SEQ ID NO: 1678 - protein, 7 aa, Artificial Sequence
  Description of Artificial Sequence: Synthetic peptide
FARGGTT

SEQ ID NO: 1679 - protein, 15 aa, Artificial Sequence
  Description of Artificial Sequence: Synthetic peptide
NAEVATMFQPGFRDY

SEQ ID NO: 1680 - protein, 6 aa, Artificial Sequence
  Description of Artificial Sequence: Synthetic peptide
SIRDMA

SEQ ID NO: 1681 - protein, 12 aa, Artificial Sequence
  Description of Artificial Sequence: Synthetic peptide
LVAIFARGGTTH

SEQ ID NO: 1682 - protein, 14 aa, Artificial Sequence
  Description of Artificial Sequence: Synthetic peptide
NAEVATMFQPGFRD

SEQ ID NO: 1683 - protein, 10 aa, Artificial Sequence
  Description of Artificial Sequence: Synthetic peptide
GRTFSSDAVG

SEQ ID NO: 1684 - protein, 13 aa, Artificial Sequence
  Description of Artificial Sequence: Synthetic peptide
HIHWSGDFTTYYY

SEQ ID NO: 1685 - protein, 16 aa, Artificial Sequence
  Description of Artificial Sequence: Synthetic peptide
PKGAIGDPRSTREYDY

SEQ ID NO: 1686 - protein, 5 aa, Artificial Sequence
  Description of Artificial Sequence: Synthetic peptide
SDAVG

SEQ ID NO: 1687 - protein, 20 aa, Artificial Sequence
  Description of Artificial Sequence: Synthetic peptide
HIHWSGDFTTYYYYGDFVKG

SEQ ID NO: 1688 - protein, 16 aa, Artificial Sequence
  Description of Artificial Sequence: Synthetic peptide
PKGAIGDPRSTREYDY

SEQ ID NO: 1689 - protein, 7 aa, Artificial Sequence
  Description of Artificial Sequence: Synthetic peptide
GRTFSSD

SEQ ID NO: 1690 - protein, 9 aa, Artificial Sequence
  Description of Artificial Sequence: Synthetic peptide
HWSGDFTTY

SEQ ID NO: 1691 - protein, 15 aa, Artificial Sequence
  Description of Artificial Sequence: Synthetic peptide
PKGAIGDPRSTREYD

SEQ ID NO: 1692 - protein, 8 aa, Artificial Sequence
  Description of Artificial Sequence: Synthetic peptide
GRTFSSDA

SEQ ID NO: 1693 - protein, 11 aa, Artificial Sequence
  Description of Artificial Sequence: Synthetic peptide
IHWSGDFTTYY

SEQ ID NO: 1694 - protein, 18 aa, Artificial Sequence
  Description of Artificial Sequence: Synthetic peptide
AAPKGAIGDPRSTREYDY

SEQ ID NO: 1695 - protein, 6 aa, Artificial Sequence
  Description of Artificial Sequence: Synthetic peptide
SSDAVG

SEQ ID NO: 1696 - protein, 16 aa, Artificial Sequence
  Description of Artificial Sequence: Synthetic peptide
FVAHIHWSGDFTTYYY

SEQ ID NO: 1697 - protein, 17 aa, Artificial Sequence
  Description of Artificial Sequence: Synthetic peptide
AAPKGAIGDPRSTREYD

SEQ ID NO: 1698 - protein, 10 aa, Artificial Sequence
  Description of Artificial Sequence: Synthetic peptide
GRTINTYVMG

SEQ ID NO: 1699 - protein, 10 aa, Artificial Sequence
  Description of Artificial Sequence: Synthetic peptide
RIDWSGSSTD

SEQ ID NO: 1700 - protein, 15 aa, Artificial Sequence
  Description of Artificial Sequence: Synthetic peptide
SAYYSGYVTHRDFGS

SEQ ID NO: 1701 - protein, 5 aa, Artificial Sequence
  Description of Artificial Sequence: Synthetic peptide
TYVMG

SEQ ID NO: 1702 - protein, 17 aa, Artificial Sequence
  Description of Artificial Sequence: Synthetic peptide
RIDWSGSSTDYADSVKG

SEQ ID NO: 1703 - protein, 15 aa, Artificial Sequence
  Description of Artificial Sequence: Synthetic peptide
SAYYSGYVTHRDFGS

SEQ ID NO: 1704 - protein, 7 aa, Artificial Sequence
  Description of Artificial Sequence: Synthetic peptide
GRTINTY

SEQ ID NO: 1705 - protein, 6 aa, Artificial Sequence
  Description of Artificial Sequence: Synthetic peptide
DWSGSS

SEQ ID NO: 1706 - protein, 14 aa, Artificial Sequence
  Description of Artificial Sequence: Synthetic peptide
SAYYSGYVTHRDFG

SEQ ID NO: 1707 - protein, 8 aa, Artificial Sequence
  Description of Artificial Sequence: Synthetic peptide
GRTINTYV

SEQ ID NO: 1708 - protein, 8 aa, Artificial Sequence
  Description of Artificial Sequence: Synthetic peptide
IDWSGSST

SEQ ID NO: 1709 - protein, 17 aa, Artificial Sequence
  Description of Artificial Sequence: Synthetic peptide
AGSAYYSGYVTHRDFGS

SEQ ID NO: 1710 - protein, 6 aa, Artificial Sequence
  Description of Artificial Sequence: Synthetic peptide
NTYVMG

SEQ ID NO: 1711 - protein, 13 aa, Artificial Sequence
  Description of Artificial Sequence: Synthetic peptide
FVARIDWSGSSTD

SEQ ID NO: 1712 - protein, 16 aa, Artificial Sequence
  Description of Artificial Sequence: Synthetic peptide
AGSAYYSGYVTHRDFG

SEQ ID NO: 1713 - protein, 10 aa, Artificial Sequence
  Description of Artificial Sequence: Synthetic peptide
GRTFSSNPMG

SEQ ID NO: 1714 - protein, 10 aa, Artificial Sequence
  Description of Artificial Sequence: Synthetic peptide
AISWSGGGTY

SEQ ID NO: 1715 - protein, 18 aa, Artificial Sequence
  Description of Artificial Sequence: Synthetic peptide
RDYSDPISLWVEDREYDY

SEQ ID NO: 1716 - protein, 5 aa, Artificial Sequence
  Description of Artificial Sequence: Synthetic peptide
SNPMG

SEQ ID NO: 1717 - protein, 17 aa, Artificial Sequence
  Description of Artificial Sequence: Synthetic peptide
AISWSGGGTYYADSVKG

SEQ ID NO: 1718 - protein, 18 aa, Artificial Sequence
  Description of Artificial Sequence: Synthetic peptide
RDYSDPISLWVEDREYDY

SEQ ID NO: 1719 - protein, 7 aa, Artificial Sequence
  Description of Artificial Sequence: Synthetic peptide
GRTFSSN

SEQ ID NO: 1720 - protein, 6 aa, Artificial Sequence
  Description of Artificial Sequence: Synthetic peptide
SWSGGG

SEQ ID NO: 1721 - protein, 17 aa, Artificial Sequence
  Description of Artificial Sequence: Synthetic peptide
RDYSDPISLWVEDREYD

SEQ ID NO: 1722 - protein, 8 aa, Artificial Sequence
  Description of Artificial Sequence: Synthetic peptide
GRTFSSNP

SEQ ID NO: 1723 - protein, 8 aa, Artificial Sequence
  Description of Artificial Sequence: Synthetic peptide
ISWSGGGT

SEQ ID NO: 1724 - protein, 20 aa, Artificial Sequence
  Description of Artificial Sequence: Synthetic peptide
ASRDYSDPISLWVEDREYDY

SEQ ID NO: 1725 - protein, 6 aa, Artificial Sequence
  Description of Artificial Sequence: Synthetic peptide
SSNPMG

SEQ ID NO: 1726 - protein, 13 aa, Artificial Sequence
  Description of Artificial Sequence: Synthetic peptide
FVAAISWSGGGTY

SEQ ID NO: 1727 - protein, 19 aa, Artificial Sequence
  Description of Artificial Sequence: Synthetic peptide
ASRDYSDPISLWVEDREYD

SEQ ID NO: 1728 - protein, 10 aa, Artificial Sequence
  Description of Artificial Sequence: Synthetic peptide
GLPFSSSRMG

SEQ ID NO: 1729 - protein, 12 aa, Artificial Sequence
  Description of Artificial Sequence: Synthetic peptide
AIGWSGRSTYKY

SEQ ID NO: 1730 - protein, 16 aa, Artificial Sequence
  Description of Artificial Sequence: Synthetic peptide
HPDYYGDPRTSGAYRY

SEQ ID NO: 1731 - protein, 5 aa, Artificial Sequence
  Description of Artificial Sequence: Synthetic peptide
SSRMG

SEQ ID NO: 1732 - protein, 19 aa, Artificial Sequence
  Description of Artificial Sequence: Synthetic peptide
AIGWSGRSTYKYYADSVKG

SEQ ID NO: 1733 - protein, 16 aa, Artificial Sequence
  Description of Artificial Sequence: Synthetic peptide
HPDYYGDPRTSGAYRY

SEQ ID NO: 1734 - protein, 7 aa, Artificial Sequence
  Description of Artificial Sequence: Synthetic peptide
GLPFSSS

SEQ ID NO: 1735 - protein, 8 aa, Artificial Sequence
  Description of Artificial Sequence: Synthetic peptide
GWSGRSTY

SEQ ID NO: 1736 - protein, 15 aa, Artificial Sequence
  Description of Artificial Sequence: Synthetic peptide
HPDYYGDPRTSGAYR

SEQ ID NO: 1737 - protein, 8 aa, Artificial Sequence
  Description of Artificial Sequence: Synthetic peptide
GLPFSSSR

SEQ ID NO: 1738 - protein, 10 aa, Artificial Sequence
  Description of Artificial Sequence: Synthetic peptide
IGWSGRSTYK

SEQ ID NO: 1739 - protein, 18 aa, Artificial Sequence
  Description of Artificial Sequence: Synthetic peptide
AAHPDYYGDPRTSGAYRY

SEQ ID NO: 1740 - protein, 6 aa, Artificial Sequence
  Description of Artificial Sequence: Synthetic peptide
SSSRMG

SEQ ID NO: 1741 - protein, 15 aa, Artificial Sequence
  Description of Artificial Sequence: Synthetic peptide
FVAAIGWSGRSTYKY

SEQ ID NO: 1742 - protein, 17 aa, Artificial Sequence
  Description of Artificial Sequence: Synthetic peptide
AAHPDYYGDPRTSGAYR

SEQ ID NO: 1743 - protein, 10 aa, Artificial Sequence
  Description of Artificial Sequence: Synthetic peptide
GRTSSLYNMG

SEQ ID NO: 1744 - protein, 10 aa, Artificial Sequence
  Description of Artificial Sequence: Synthetic peptide
AIHWGGGRTY

SEQ ID NO: 1745 - protein, 22 aa, Artificial Sequence
  Description of Artificial Sequence: Synthetic peptide
RRAPELLDDYKQKPEEIGAYHY

SEQ ID NO: 1746 - protein, 5 aa, Artificial Sequence
  Description of Artificial Sequence: Synthetic peptide
LYNMG

SEQ ID NO: 1747 - protein, 17 aa, Artificial Sequence
  Description of Artificial Sequence: Synthetic peptide
AIHWGGGRTYYADSVKG

SEQ ID NO: 1748 - protein, 22 aa, Artificial Sequence
  Description of Artificial Sequence: Synthetic peptide
RRAPELLDDYKQKPEEIGAYHY

SEQ ID NO: 1749 - protein, 7 aa, Artificial Sequence
  Description of Artificial Sequence: Synthetic peptide
GRTSSLY

SEQ ID NO: 1750 - protein, 6 aa, Artificial Sequence
  Description of Artificial Sequence: Synthetic peptide
HWGGGR

SEQ ID NO: 1751 - protein, 21 aa, Artificial Sequence
  Description of Artificial Sequence: Synthetic peptide
RRAPELLDDYKQKPEEIGAYH

SEQ ID NO: 1752 - protein, 8 aa, Artificial Sequence
  Description of Artificial Sequence: Synthetic peptide
GRTSSLYN

SEQ ID NO: 1753 - protein, 8 aa, Artificial Sequence
  Description of Artificial Sequence: Synthetic peptide
IHWGGGRT

SEQ ID NO: 1754 - protein, 24 aa, Artificial Sequence
  Description of Artificial Sequence: Synthetic peptide
AARRAPELLDDYKQKPEEIGAYHY

SEQ ID NO: 1755 - protein, 6 aa, Artificial Sequence
  Description of Artificial Sequence: Synthetic peptide
SLYNMG

SEQ ID NO: 1756 - protein, 13 aa, Artificial Sequence
  Description of Artificial Sequence: Synthetic peptide
FVAAIHWGGGRTY

SEQ ID NO: 1757 - protein, 23 aa, Artificial Sequence
  Description of Artificial Sequence: Synthetic peptide
AARRAPELLDDYKQKPEEIGAYH

SEQ ID NO: 1758 - protein, 10 aa, Artificial Sequence
  Description of Artificial Sequence: Synthetic peptide
GRTFSVYGMG

SEQ ID NO: 1759 - protein, 10 aa, Artificial Sequence
  Description of Artificial Sequence: Synthetic peptide
AISWSDGSTY

SEQ ID NO: 1760 - protein, 16 aa, Artificial Sequence
  Description of Artificial Sequence: Synthetic peptide
DLTGWGLDADVSEYDY

SEQ ID NO: 1761 - protein, 5 aa, Artificial Sequence
  Description of Artificial Sequence: Synthetic peptide
VYGMG

SEQ ID NO: 1762 - protein, 17 aa, Artificial Sequence
  Description of Artificial Sequence: Synthetic peptide
AISWSDGSTYYADSVKG

SEQ ID NO: 1763 - protein, 16 aa, Artificial Sequence
  Description of Artificial Sequence: Synthetic peptide
DLTGWGLDADVSEYDY

SEQ ID NO: 1764 - protein, 7 aa, Artificial Sequence
  Description of Artificial Sequence: Synthetic peptide
GRTFSVY

SEQ ID NO: 1765 - protein, 6 aa, Artificial Sequence
  Description of Artificial Sequence: Synthetic peptide
SWSDGS

SEQ ID NO: 1766 - protein, 15 aa, Artificial Sequence
  Description of Artificial Sequence: Synthetic peptide
DLTGWGLDADVSEYD

SEQ ID NO: 1767 - protein, 8 aa, Artificial Sequence
  Description of Artificial Sequence: Synthetic peptide
GRTFSVYG

SEQ ID NO: 1768 - protein, 8 aa, Artificial Sequence
  Description of Artificial Sequence: Synthetic peptide
ISWSDGST

SEQ ID NO: 1769 - protein, 18 aa, Artificial Sequence
  Description of Artificial Sequence: Synthetic peptide
AADLTGWGLDADVSEYDY

SEQ ID NO: 1770 - protein, 6 aa, Artificial Sequence
  Description of Artificial Sequence: Synthetic peptide
SVYGMG

SEQ ID NO: 1771 - protein, 13 aa, Artificial Sequence
  Description of Artificial Sequence: Synthetic peptide
FVAAISWSDGSTY

SEQ ID NO: 1772 - protein, 17 aa, Artificial Sequence
  Description of Artificial Sequence: Synthetic peptide
AADLTGWGLDADVSEYD

SEQ ID NO: 1773 - protein, 10 aa, Artificial Sequence
  Description of Artificial Sequence: Synthetic peptide
GSIASIRDMA

SEQ ID NO: 1774 - protein, 9 aa, Artificial Sequence
  Description of Artificial Sequence: Synthetic peptide
IFARGGTTH

SEQ ID NO: 1775 - protein, 13 aa, Artificial Sequence
  Description of Artificial Sequence: Synthetic peptide
EVATMFQPGFRDY

SEQ ID NO: 1776 - protein, 5 aa, Artificial Sequence
  Description of Artificial Sequence: Synthetic peptide
IRDMA

SEQ ID NO: 1777 - protein, 16 aa, Artificial Sequence
  Description of Artificial Sequence: Synthetic peptide
IFARGGTTHYADSVKG

SEQ ID NO: 1778 - protein, 13 aa, Artificial Sequence
  Description of Artificial Sequence: Synthetic peptide
EVATMFQPGFRDY

SEQ ID NO: 1779 - protein, 7 aa, Artificial Sequence
  Description of Artificial Sequence: Synthetic peptide
GSIASIR

SEQ ID NO: 1780 - protein, 5 aa, Artificial Sequence
  Description of Artificial Sequence: Synthetic peptide
ARGGT

SEQ ID NO: 1781 - protein, 12 aa, Artificial Sequence
  Description of Artificial Sequence: Synthetic peptide
EVATMFQPGFRD

SEQ ID NO: 1782 - protein, 8 aa, Artificial Sequence
  Description of Artificial Sequence: Synthetic peptide
GSIASIRD

SEQ ID NO: 1783 - protein, 7 aa, Artificial Sequence
  Description of Artificial Sequence: Synthetic peptide
FARGGTT

SEQ ID NO: 1784 - protein, 15 aa, Artificial Sequence
  Description of Artificial Sequence: Synthetic peptide
NAEVATMFQPGFRDY

SEQ ID NO: 1785 - protein, 6 aa, Artificial Sequence
  Description of Artificial Sequence: Synthetic peptide
SIRDMA

SEQ ID NO: 1786 - protein, 12 aa, Artificial Sequence
  Description of Artificial Sequence: Synthetic peptide
LVAIFARGGTTH

SEQ ID NO: 1787 - protein, 14 aa, Artificial Sequence
  Description of Artificial Sequence: Synthetic peptide
NAEVATMFQPGFRD

SEQ ID NO: 1788 - protein, 10 aa, Artificial Sequence
  Description of Artificial Sequence: Synthetic peptide
GRAFSSGRMG

SEQ ID NO: 1789 - protein, 12 aa, Artificial Sequence
  Description of Artificial Sequence: Synthetic peptide
AISWSGHTTYKY

SEQ ID NO: 1790 - protein, 18 aa, Artificial Sequence
  Description of Artificial Sequence: Synthetic peptide
RQSLVAGGDPRGQSEYDY

SEQ ID NO: 1791 - protein, 5 aa, Artificial Sequence
  Description of Artificial Sequence: Synthetic peptide
SGRMG

SEQ ID NO: 1792 - protein, 19 aa, Artificial Sequence
  Description of Artificial Sequence: Synthetic peptide
AISWSGHTTYKYYADSVKG

SEQ ID NO: 1793 - protein, 18 aa, Artificial Sequence
  Description of Artificial Sequence: Synthetic peptide
RQSLVAGGDPRGQSEYDY

SEQ ID NO: 1794 - protein, 7 aa, Artificial Sequence
  Description of Artificial Sequence: Synthetic peptide
GRAFSSG

SEQ ID NO: 1795 - protein, 8 aa, Artificial Sequence
  Description of Artificial Sequence: Synthetic peptide
SWSGHTTY

SEQ ID NO: 1796 - protein, 17 aa, Artificial Sequence
  Description of Artificial Sequence: Synthetic peptide
RQSLVAGGDPRGQSEYD

SEQ ID NO: 1797 - protein, 8 aa, Artificial Sequence
  Description of Artificial Sequence: Synthetic peptide
GRAFSSGR

SEQ ID NO: 1798 - protein, 10 aa, Artificial Sequence
  Description of Artificial Sequence: Synthetic peptide
ISWSGHTTYK

SEQ ID NO: 1799 - protein, 20 aa, Artificial Sequence
  Description of Artificial Sequence: Synthetic peptide
AARQSLVAGGDPRGQSEYDY

SEQ ID NO: 1800 - protein, 6 aa, Artificial Sequence
  Description of Artificial Sequence: Synthetic peptide
SSGRMG

SEQ ID NO: 1801 - protein, 15 aa, Artificial Sequence
  Description of Artificial Sequence: Synthetic peptide
FVAAISWSGHTTYKY

SEQ ID NO: 1802 - protein, 19 aa, Artificial Sequence
  Description of Artificial Sequence: Synthetic peptide
AARQSLVAGGDPRGQSEYD

SEQ ID NO: 1803 - protein, 10 aa, Artificial Sequence
  Description of Artificial Sequence: Synthetic peptide
GRTFSSNPMG

SEQ ID NO: 1804 - protein, 10 aa, Artificial Sequence
  Description of Artificial Sequence: Synthetic peptide
AISWSGGGTY

SEQ ID NO: 1805 - protein, 18 aa, Artificial Sequence
  Description of Artificial Sequence: Synthetic peptide
RDYSDPISLWVEDREYDY

SEQ ID NO: 1806 - protein, 5 aa, Artificial Sequence
  Description of Artificial Sequence: Synthetic peptide
SNPMG

SEQ ID NO: 1807 - protein, 17 aa, Artificial Sequence
  Description of Artificial Sequence: Synthetic peptide
AISWSGGGTYYADSVKG

SEQ ID NO: 1808 - protein, 18 aa, Artificial Sequence
  Description of Artificial Sequence: Synthetic peptide
RDYSDPISLWVEDREYDY

SEQ ID NO: 1809 - protein, 7 aa, Artificial Sequence
  Description of Artificial Sequence: Synthetic peptide
GRTFSSN

SEQ ID NO: 1810 - protein, 6 aa, Artificial Sequence
  Description of Artificial Sequence: Synthetic peptide
SWSGGG

SEQ ID NO: 1811 - protein, 17 aa, Artificial Sequence
  Description of Artificial Sequence: Synthetic peptide
RDYSDPISLWVEDREYD

SEQ ID NO: 1812 - protein, 8 aa, Artificial Sequence
  Description of Artificial Sequence: Synthetic peptide
GRTFSSNP

SEQ ID NO: 1813 - protein, 8 aa, Artificial Sequence
  Description of Artificial Sequence: Synthetic peptide
ISWSGGGT

SEQ ID NO: 1814 - protein, 20 aa, Artificial Sequence
  Description of Artificial Sequence: Synthetic peptide
ASRDYSDPISLWVEDREYDY

SEQ ID NO: 1815 - protein, 6 aa, Artificial Sequence
  Description of Artificial Sequence: Synthetic peptide
SSNPMG

SEQ ID NO: 1816 - protein, 13 aa, Artificial Sequence
  Description of Artificial Sequence: Synthetic peptide
FVAAISWSGGGTY

SEQ ID NO: 1817 - protein, 19 aa, Artificial Sequence
  Description of Artificial Sequence: Synthetic peptide
ASRDYSDPISLWVEDREYD

SEQ ID NO: 1818 - protein, 12 aa, Artificial Sequence
  Description of Artificial Sequence: Synthetic peptide
GRTLSFDTYAMA

SEQ ID NO: 1819 - protein, 10 aa, Artificial Sequence
  Description of Artificial Sequence: Synthetic peptide
SIDWNGVNTY

SEQ ID NO: 1820 - protein, 14 aa, Artificial Sequence
  Description of Artificial Sequence: Synthetic peptide
AQYYRSGTSFPANS

SEQ ID NO: 1821 - protein, 7 aa, Artificial Sequence
  Description of Artificial Sequence: Synthetic peptide
FDTYAMA

SEQ ID NO: 1822 - protein, 17 aa, Artificial Sequence
  Description of Artificial Sequence: Synthetic peptide
SIDWNGVNTYYADSVKG

SEQ ID NO: 1823 - protein, 14 aa, Artificial Sequence
  Description of Artificial Sequence: Synthetic peptide
AQYYRSGTSFPANS

SEQ ID NO: 1824 - protein, 9 aa, Artificial Sequence
  Description of Artificial Sequence: Synthetic peptide
GRTLSFDTY

SEQ ID NO: 1825 - protein, 6 aa, Artificial Sequence
  Description of Artificial Sequence: Synthetic peptide
DWNGVN

SEQ ID NO: 1826 - protein, 13 aa, Artificial Sequence
  Description of Artificial Sequence: Synthetic peptide
AQYYRSGTSFPAN

SEQ ID NO: 1827 - protein, 10 aa, Artificial Sequence
  Description of Artificial Sequence: Synthetic peptide
GRTLSFDTYA

SEQ ID NO: 1828 - protein, 8 aa, Artificial Sequence
  Description of Artificial Sequence: Synthetic peptide
IDWNGVNT

SEQ ID NO: 1829 - protein, 16 aa, Artificial Sequence
  Description of Artificial Sequence: Synthetic peptide
AAAQYYRSGTSFPANS

SEQ ID NO: 1830 - protein, 8 aa, Artificial Sequence
  Description of Artificial Sequence: Synthetic peptide
SFDTYAMA

SEQ ID NO: 1831 - protein, 13 aa, Artificial Sequence
  Description of Artificial Sequence: Synthetic peptide
FVASIDWNGVNTY

SEQ ID NO: 1832 - protein, 15 aa, Artificial Sequence
  Description of Artificial Sequence: Synthetic peptide
AAAQYYRSGTSFPAN

SEQ ID NO: 1833 - protein, 10 aa, Artificial Sequence
  Description of Artificial Sequence: Synthetic peptide
GSFFSLRDMG

SEQ ID NO: 1834 - protein, 9 aa, Artificial Sequence
  Description of Artificial Sequence: Synthetic peptide
IFTRGGTTY

SEQ ID NO: 1835 - protein, 13 aa, Artificial Sequence
  Description of Artificial Sequence: Synthetic peptide
EIRQYSANLYRDF

SEQ ID NO: 1836 - protein, 5 aa, Artificial Sequence
  Description of Artificial Sequence: Synthetic peptide
LRDMG

SEQ ID NO: 1837 - protein, 16 aa, Artificial Sequence
  Description of Artificial Sequence: Synthetic peptide
IFTRGGTTYYADSVKG

SEQ ID NO: 1838 - protein, 13 aa, Artificial Sequence
  Description of Artificial Sequence: Synthetic peptide
EIRQYSANLYRDF

SEQ ID NO: 1839 - protein, 7 aa, Artificial Sequence
  Description of Artificial Sequence: Synthetic peptide
GSFFSLR

SEQ ID NO: 1840 - protein, 5 aa, Artificial Sequence
  Description of Artificial Sequence: Synthetic peptide
TRGGT

SEQ ID NO: 1841 - protein, 12 aa, Artificial Sequence
  Description of Artificial Sequence: Synthetic peptide
EIRQYSANLYRD

SEQ ID NO: 1842 - protein, 8 aa, Artificial Sequence
  Description of Artificial Sequence: Synthetic peptide
GSFFSLRD

SEQ ID NO: 1843 - protein, 7 aa, Artificial Sequence
  Description of Artificial Sequence: Synthetic peptide
FTRGGTT

SEQ ID NO: 1844 - protein, 15 aa, Artificial Sequence
  Description of Artificial Sequence: Synthetic peptide
NAEIRQYSANLYRDF

SEQ ID NO: 1845 - protein, 6 aa, Artificial Sequence
  Description of Artificial Sequence: Synthetic peptide
SLRDMG

SEQ ID NO: 1846 - protein, 12 aa, Artificial Sequence
  Description of Artificial Sequence: Synthetic peptide
LVGIFTRGGTTY

SEQ ID NO: 1847 - protein, 14 aa, Artificial Sequence
  Description of Artificial Sequence: Synthetic peptide
NAEIRQYSANLYRD

SEQ ID NO: 1848 - protein, 10 aa, Artificial Sequence
  Description of Artificial Sequence: Synthetic peptide
GSIFSIRDMG

SEQ ID NO: 1849 - protein, 9 aa, Artificial Sequence
  Description of Artificial Sequence: Synthetic peptide
IFARGGSTH

SEQ ID NO: 1850 - protein, 13 aa, Artificial Sequence
  Description of Artificial Sequence: Synthetic peptide
EVATMIQPGFRDY

SEQ ID NO: 1851 - protein, 5 aa, Artificial Sequence
  Description of Artificial Sequence: Synthetic peptide
IRDMG

SEQ ID NO: 1852 - protein, 16 aa, Artificial Sequence
  Description of Artificial Sequence: Synthetic peptide
IFARGGSTHYADSVKG

SEQ ID NO: 1853 - protein, 13 aa, Artificial Sequence
  Description of Artificial Sequence: Synthetic peptide
EVATMIQPGFRDY

SEQ ID NO: 1854 - protein, 7 aa, Artificial Sequence
  Description of Artificial Sequence: Synthetic peptide
GSIFSIR

SEQ ID NO: 1855 - protein, 5 aa, Artificial Sequence
  Description of Artificial Sequence: Synthetic peptide
ARGGS

SEQ ID NO: 1856 - protein, 12 aa, Artificial Sequence
  Description of Artificial Sequence: Synthetic peptide
EVATMIQPGFRD

SEQ ID NO: 1857 - protein, 8 aa, Artificial Sequence
  Description of Artificial Sequence: Synthetic peptide
GSIFSIRD

SEQ ID NO: 1858 - protein, 7 aa, Artificial Sequence
  Description of Artificial Sequence: Synthetic peptide
FARGGST

SEQ ID NO: 1859 - protein, 15 aa, Artificial Sequence
  Description of Artificial Sequence: Synthetic peptide
NAEVATMIQPGFRDY

SEQ ID NO: 1860 - protein, 6 aa, Artificial Sequence
  Description of Artificial Sequence: Synthetic peptide
SIRDMG

SEQ ID NO: 1861 - protein, 12 aa, Artificial Sequence
  Description of Artificial Sequence: Synthetic peptide
LVAIFARGGSTH

SEQ ID NO: 1862 - protein, 14 aa, Artificial Sequence
  Description of Artificial Sequence: Synthetic peptide
NAEVATMIQPGFRD

SEQ ID NO: 1863 - protein, 10 aa, Artificial Sequence
  Description of Artificial Sequence: Synthetic peptide
GRTFSVYGMG

SEQ ID NO: 1864 - protein, 10 aa, Artificial Sequence
  Description of Artificial Sequence: Synthetic peptide
AISWSDGSTY

SEQ ID NO: 1865 - protein, 16 aa, Artificial Sequence
  Description of Artificial Sequence: Synthetic peptide
DLTGWGLDADVSEYDY

SEQ ID NO: 1866 - protein, 5 aa, Artificial Sequence
  Description of Artificial Sequence: Synthetic peptide
VYGMG

SEQ ID NO: 1867 - protein, 17 aa, Artificial Sequence
  Description of Artificial Sequence: Synthetic peptide
AISWSDGSTYYADSVKG

SEQ ID NO: 1868 - protein, 16 aa, Artificial Sequence
  Description of Artificial Sequence: Synthetic peptide
DLTGWGLDADVSEYDY

SEQ ID NO: 1869 - protein, 7 aa, Artificial Sequence
  Description of Artificial Sequence: Synthetic peptide
GRTFSVY

SEQ ID NO: 1870 - protein, 6 aa, Artificial Sequence
  Description of Artificial Sequence: Synthetic peptide
SWSDGS

SEQ ID NO: 1871 - protein, 15 aa, Artificial Sequence
  Description of Artificial Sequence: Synthetic peptide
DLTGWGLDADVSEYD

SEQ ID NO: 1872 - protein, 8 aa, Artificial Sequence
  Description of Artificial Sequence: Synthetic peptide
GRTFSVYG

SEQ ID NO: 1873 - protein, 8 aa, Artificial Sequence
  Description of Artificial Sequence: Synthetic peptide
ISWSDGST

SEQ ID NO: 1874 - protein, 18 aa, Artificial Sequence
  Description of Artificial Sequence: Synthetic peptide
AADLTGWGLDADVSEYDY

SEQ ID NO: 1875 - protein, 6 aa, Artificial Sequence
  Description of Artificial Sequence: Synthetic peptide
SVYGMG

SEQ ID NO: 1876 - protein, 13 aa, Artificial Sequence
  Description of Artificial Sequence: Synthetic peptide
FVAAISWSDGSTY

SEQ ID NO: 1877 - protein, 17 aa, Artificial Sequence
  Description of Artificial Sequence: Synthetic peptide
AADLTGWGLDADVSEYD

SEQ ID NO: 1878 - protein, 10 aa, Artificial Sequence
  Description of Artificial Sequence: Synthetic peptide
GRTFSSYAMG

SEQ ID NO: 1879 - protein, 10 aa, Artificial Sequence
  Description of Artificial Sequence: Synthetic peptide
VISWSGGSTY

SEQ ID NO: 1880 - protein, 29 aa, Artificial Sequence
  Description of Artificial Sequence: Synthetic peptide
GEQPGSNRPYIPEQPIEFMPTDYPSWYDY

SEQ ID NO: 1881 - protein, 5 aa, Artificial Sequence
  Description of Artificial Sequence: Synthetic peptide
SYAMG

SEQ ID NO: 1882 - protein, 17 aa, Artificial Sequence
  Description of Artificial Sequence: Synthetic peptide
VISWSGGSTYYADSVKG

SEQ ID NO: 1883 - protein, 29 aa, Artificial Sequence
  Description of Artificial Sequence: Synthetic peptide
GEQPGSNRPYIPEQPIEFMPTDYPSWYDY

SEQ ID NO: 1884 - protein, 7 aa, Artificial Sequence
  Description of Artificial Sequence: Synthetic peptide
GRTFSSY

SEQ ID NO: 1885 - protein, 6 aa, Artificial Sequence
  Description of Artificial Sequence: Synthetic peptide
SWSGGS

SEQ ID NO: 1886 - protein, 28 aa, Artificial Sequence
  Description of Artificial Sequence: Synthetic peptide
GEQPGSNRPYIPEQPIEFMPTDYPSWYD

SEQ ID NO: 1887 - protein, 8 aa, Artificial Sequence
  Description of Artificial Sequence: Synthetic peptide
GRTFSSYA

SEQ ID NO: 1888 - protein, 8 aa, Artificial Sequence
  Description of Artificial Sequence: Synthetic peptide
ISWSGGST

SEQ ID NO: 1889 - protein, 31 aa, Artificial Sequence; identical to SEQ ID NO: 494
  Description of Artificial Sequence: Synthetic polypeptide

SEQ ID NO: 1890 - protein, 6 aa, Artificial Sequence
  Description of Artificial Sequence: Synthetic peptide
SSYAMG

SEQ ID NO: 1891 - protein, 13 aa, Artificial Sequence
  Description of Artificial Sequence: Synthetic peptide
FVAVISWSGGSTY

SEQ ID NO: 1892 - protein, 30 aa, Artificial Sequence; identical to SEQ ID NO: 497
  Description of Artificial Sequence: Synthetic polypeptide

SEQ ID NO: 1893 - protein, 10 aa, Artificial Sequence
  Description of Artificial Sequence: Synthetic peptide
GPTTSTFAMG

SEQ ID NO: 1894 - protein, 10 aa, Artificial Sequence
  Description of Artificial Sequence: Synthetic peptide
AISWTGWATY

SEQ ID NO: 1895 - protein, 14 aa, Artificial Sequence
  Description of Artificial Sequence: Synthetic peptide
HPDSDPIGLSGYDY

SEQ ID NO: 1896 - protein, 5 aa, Artificial Sequence
  Description of Artificial Sequence: Synthetic peptide
TFAMG

SEQ ID NO: 1897 - protein, 17 aa, Artificial Sequence
  Description of Artificial Sequence: Synthetic peptide
AISWTGWATYYPDSVKG

SEQ ID NO: 1898 - protein, 14 aa, Artificial Sequence
  Description of Artificial Sequence: Synthetic peptide
HPDSDPIGLSGYDY

SEQ ID NO: 1899 - protein, 7 aa, Artificial Sequence
  Description of Artificial Sequence: Synthetic peptide
GPTTSTF

SEQ ID NO: 1900 - protein, 6 aa, Artificial Sequence
  Description of Artificial Sequence: Synthetic peptide
SWTGWA

SEQ ID NO: 1901 - protein, 13 aa, Artificial Sequence
  Description of Artificial Sequence: Synthetic peptide
HPDSDPIGLSGYD

SEQ ID NO: 1902 - protein, 8 aa, Artificial Sequence
  Description of Artificial Sequence: Synthetic peptide
GPTTSTFA

SEQ ID NO: 1903 - protein, 8 aa, Artificial Sequence
  Description of Artificial Sequence: Synthetic peptide
ISWTGWAT

SEQ ID NO: 1904 - protein, 16 aa, Artificial Sequence
  Description of Artificial Sequence: Synthetic peptide
AFHPDSDPIGLSGYDY

SEQ ID NO: 1905 - protein, 6 aa, Artificial Sequence
  Description of Artificial Sequence: Synthetic peptide
STFAMG

SEQ ID NO: 1906 - protein, 13 aa, Artificial Sequence
  Description of Artificial Sequence: Synthetic peptide
IVAAISWTGWATY

SEQ ID NO: 1907 - protein, 15 aa, Artificial Sequence
  Description of Artificial Sequence: Synthetic peptide
AFHPDSDPIGLSGYD

SEQ ID NO: 1908 - protein, 10 aa, Artificial Sequence
  Description of Artificial Sequence: Synthetic peptide
GRTLRSYIVG

SEQ ID NO: 1909 - protein, 10 aa, Artificial Sequence
  Description of Artificial Sequence: Synthetic peptide
AVTWSDGRRV

SEQ ID NO: 1910 - protein, 14 aa, Artificial Sequence
  Description of Artificial Sequence: Synthetic peptide
SHGGAYVESRAYEY

SEQ ID NO: 1911 - protein, 5 aa, Artificial Sequence
  Description of Artificial Sequence: Synthetic peptide
SYIVG

SEQ ID NO: 1912 - protein, 17 aa, Artificial Sequence
  Description of Artificial Sequence: Synthetic peptide
AVTWSDGRRVTADPVKG

SEQ ID NO: 1913 - protein, 14 aa, Artificial Sequence
  Description of Artificial Sequence: Synthetic peptide
SHGGAYVESRAYEY

SEQ ID NO: 1914 - protein, 7 aa, Artificial Sequence
  Description of Artificial Sequence: Synthetic peptide
GRTLRSY

SEQ ID NO: 1915 - protein, 6 aa, Artificial Sequence
  Description of Artificial Sequence: Synthetic peptide
TWSDGR

SEQ ID NO: 1916 - protein, 13 aa, Artificial Sequence
  Description of Artificial Sequence: Synthetic peptide
SHGGAYVESRAYE

SEQ ID NO: 1917 - protein, 8 aa, Artificial Sequence
  Description of Artificial Sequence: Synthetic peptide
GRTLRSYI

SEQ ID NO: 1918 - protein, 8 aa, Artificial Sequence
  Description of Artificial Sequence: Synthetic peptide
VTWSDGRR

SEQ ID NO: 1919 - protein, 16 aa, Artificial Sequence
  Description of Artificial Sequence: Synthetic peptide
AVSHGGAYVESRAYEY

SEQ ID NO: 1920 - protein, 6 aa, Artificial Sequence
  Description of Artificial Sequence: Synthetic peptide
RSYIVG

SEQ ID NO: 1921 - protein, 13 aa, Artificial Sequence
  Description of Artificial Sequence: Synthetic peptide
FVAAVTWSDGRRV

SEQ ID NO: 1922 - protein, 15 aa, Artificial Sequence
  Description of Artificial Sequence: Synthetic peptide
AVSHGGAYVESRAYE

SEQ ID NO: 1923 - protein, 10 aa, Artificial Sequence
  Description of Artificial Sequence: Synthetic peptide
GRTINTYVMG

SEQ ID NO: 1924 - protein, 10 aa, Artificial Sequence
  Description of Artificial Sequence: Synthetic peptide
RIDWSGSSTD

SEQ ID NO: 1925 - protein, 15 aa, Artificial Sequence
  Description of Artificial Sequence: Synthetic peptide
SAYYSGYVTHRDFGS

SEQ ID NO: 1926 - protein, 5 aa, Artificial Sequence
  Description of Artificial Sequence: Synthetic peptide
TYVMG

SEQ ID NO: 1927 - protein, 17 aa, Artificial Sequence
  Description of Artificial Sequence: Synthetic peptide
RIDWSGSSTDYADSVKG

SEQ ID NO: 1928 - protein, 15 aa, Artificial Sequence
  Description of Artificial Sequence: Synthetic peptide
SAYYSGYVTHRDFGS

SEQ ID NO: 1929 - protein, 7 aa, Artificial Sequence
  Description of Artificial Sequence: Synthetic peptide
GRTINTY

SEQ ID NO: 1930 - protein, 6 aa, Artificial Sequence
  Description of Artificial Sequence: Synthetic peptide
DWSGSS

SEQ ID NO: 1931 - protein, 14 aa, Artificial Sequence
  Description of Artificial Sequence: Synthetic peptide
SAYYSGYVTHRDFG

SEQ ID NO: 1932 - protein, 8 aa, Artificial Sequence
  Description of Artificial Sequence: Synthetic peptide
GRTINTYV

SEQ ID NO: 1933 - protein, 8 aa, Artificial Sequence
  Description of Artificial Sequence: Synthetic peptide
IDWSGSST

SEQ ID NO: 1934 - protein, 17 aa, Artificial Sequence
  Description of Artificial Sequence: Synthetic peptide
AGSAYYSGYVTHRDFGS

SEQ ID NO: 1935 - protein, 6 aa, Artificial Sequence
  Description of Artificial Sequence: Synthetic peptide
NTYVMG

SEQ ID NO: 1936 - protein, 13 aa, Artificial Sequence
  Description of Artificial Sequence: Synthetic peptide
FVARIDWSGSSTD

SEQ ID NO: 1937 - protein, 16 aa, Artificial Sequence
  Description of Artificial Sequence: Synthetic peptide
AGSAYYSGYVTHRDFG

SEQ ID NO: 1938 - protein, 12 aa, Artificial Sequence
  Description of Artificial Sequence: Synthetic peptide
GRSLGFDTYAMG

SEQ ID NO: 1939 - protein, 10 aa, Artificial Sequence
  Description of Artificial Sequence: Synthetic peptide
SIDWNGGNTY

SEQ ID NO: 1940 - protein, 14 aa, Artificial Sequence
  Description of Artificial Sequence: Synthetic peptide
ARYYTSGTYFPANY

SEQ ID NO: 1941 - protein, 7 aa, Artificial Sequence
  Description of Artificial Sequence: Synthetic peptide
FDTYAMG

SEQ ID NO: 1942 - protein, 17 aa, Artificial Sequence
  Description of Artificial Sequence: Synthetic peptide
SIDWNGGNTYYADSVKG

SEQ ID NO: 1943 - protein, 14 aa, Artificial Sequence
  Description of Artificial Sequence: Synthetic peptide
ARYYTSGTYFPANY

SEQ ID NO: 1944 - protein, 9 aa, Artificial Sequence
  Description of Artificial Sequence: Synthetic peptide
GRSLGFDTY

SEQ ID NO: 1945 - protein, 6 aa, Artificial Sequence
  Description of Artificial Sequence: Synthetic peptide
DWNGGN

SEQ ID NO: 1946 - protein, 13 aa, Artificial Sequence
  Description of Artificial Sequence: Synthetic peptide
ARYYTSGTYFPAN

SEQ ID NO: 1947 - protein, 10 aa, Artificial Sequence
  Description of Artificial Sequence: Synthetic peptide
GRSLGFDTYA

SEQ ID NO: 1948 - protein, 8 aa, Artificial Sequence
  Description of Artificial Sequence: Synthetic peptide
IDWNGGNT

SEQ ID NO: 1949 - protein, 16 aa, Artificial Sequence
  Description of Artificial Sequence: Synthetic peptide
AAARYYTSGTYFPANY

SEQ ID NO: 1950 - protein, 8 aa, Artificial Sequence
  Description of Artificial Sequence: Synthetic peptide
GFDTYAMG

SEQ ID NO: 1951 - protein, 13 aa, Artificial Sequence
  Description of Artificial Sequence: Synthetic peptide
FVASIDWNGGNTY

SEQ ID NO: 1952 - protein, 15 aa, Artificial Sequence
  Description of Artificial Sequence: Synthetic peptide
AAARYYTSGTYFPAN

SEQ ID NO: 1953 - protein, 461 aa, Artificial Sequence
  Description of Artificial Sequence: Synthetic polypeptide
QVQLVQSGAEVKKPGSSVKVSCKSSGGTSNNYAISWVRQAPGQGLDWMGGISPIFGSTAYAQKFQGRVTISADIFSNTAYMELNSLTSEDTAVYFCARHGNYYYYSGMDVWGQGTTVTVSSASPTSPKVFPLSLDSTPQDGNVVVACLVQGFFPQEPLSVTWSESGQNVTARNFPPSQDASGDLYTTSSQLTLPATQCPDGKSVTCHVKHYTNPSQDVTVPCPVPPPPPCCHPRLSLHRPALEDLLLGSEANLTCTLTGLRDASGATFTWTPSSGKSAVQGPPERDLCGCYSVSSVLPGCAQPWNHGETFTCTAAHPELKTPLTANITKSGNTFRPEVHLLPPPSEELALNELVTLTCLARGFSPKDVLVRWLQGSQELPREKYLTWASRQEPSQGTTTFAVTSILRVAAEDWKKGDTFSCMVGHEALPLAFTQKTIDRLAGKPTHVNVSVVMAEVDGTCY

SEQ ID NO: 1954 - protein, 216 aa, Artificial Sequence
  Description of Artificial Sequence: Synthetic polypeptide
QSALTQPPAVSGTPGQRVTISCSGSDSNIGRRSVNWYQQFPGTAPKLLIYSNDQRPSVVPDRFSGSKSGTSASLAISGLQSEDEAEYYCAAWDDSLKGAVFGGGTQLTVLGQPKAAPSVTLFPPSSEELQANKATLVCLISDFYPGAVTVAWKADSSPVKAGVETTTPSKQSNNKYAASSYLSLTPEQWKSHRSYSCQVTHEGSTVEKTVAPTECS

SEQ ID NO: 1955 - protein, 153 aa, Artificial Sequence
  Description of Artificial Sequence: Synthetic polypeptide
SRDSSASASRVAGITAQEDERIVLVDNKCKCARITSRIIRSSEDPNEDIVERNIRIIVPLNNRENISDPTSPLRTRFVYHLSDLCKKCDPTEVELDNQIVTATQSNICDEDSATETCYTYDRNKCYTAVVPLVYGGETKMVETALTPDACYPD

SEQ ID NO: 1956 - protein, 626 aa, Artificial Sequence
  Description of Artificial Sequence: Synthetic polypeptide
KSPIFGPEEVNSVEGNSVSITCYYPPTSVNRHTRKYWCRQGARGGCITLISSEGYVSSKYAGRANLTNFPENGTFVVNIAQLSQDDSGRYKCGLGINSRGLSFDVSLEVSQGPGLLNDTKVYTVDLGRTVTINCPFKTENAQKRKSLYKQIGLYPVLVIDSSGYVNPNYTGRIRLDIQGTGQLLFSVVINQLRLSDAGQYLCQAGDDSNSNKKNADLQVLKPEPELVYEDLRGSVTFHCALGPEVANVAKFLCRQSSGENCDVVVNTLGKRAPAFEGRILLNPQDKDGSFSVVITGLRKEDAGRYLCGAHSDGQLQEGSPIQAWQLFVNEESTIPRSPTVVKGVAGSSVAVLCPYNRKESKSIKYWCLWEGAQNGRCPLLVDSEGWVKAQYEGRLSLLEEPGNGTFTVILNQLTSRDAGFYWCLTNGDTLWRTTVEIKIIEGEPNLKVPGNVTAVLGETLKVPCHFPCKFSSYEKYWCKWNNTGCQALPSQDEGPSKAFVNCDENSRLVSLTLNLVTRADEGWYWCGVKQGHFYGETAAVYVAVEERKAAGSRDVSLAKADAAPDEKVLDSGFREIENKAIQDPRLFAEEKAVADTRDQADGSRASVDSGSSEEQGGSSRHHHHHH

SEQ ID NO: 1957 - protein, 117 aa, Artificial Sequence
  Description of Artificial Sequence: Synthetic polypeptide
KSPIFGPEEVNSVEGNSVSITCYYPPTSVNRHTRKYWCRQGARGGCITLISSEGYVSSKYAGRANLTNFPENGTFVVNIAQLSQDDSGRYKCGLGINSRGLSFDVSLEVGSHHHHHH

SEQ ID NO: 1958 - protein, 123 aa, Artificial Sequence
  Description of Artificial Sequence: Synthetic polypeptide
SQGPGLLNDTKVYTVDLGRTVTINCPFKTENAQKRKSLYKQIGLYPVLVIDSSGYVNPNYTGRIRLDIQGTGQLLFSVVINQLRLSDAGQYLCQAGDDSNSNKKNADLQVLKPEPGSHHHHHH

SEQ ID NO: 1959 - protein, 121 aa, Artificial Sequence
  Description of Artificial Sequence: Synthetic polypeptide
KPEPELVYEDLRGSVTFHCALGPEVANVAKFLCRQSSGENCDVVVNTLGKRAPAFEGRILLNPQDKDGSFSVVITGLRKEDAGRYLCGAHSDGQLQEGSPIQAWQLFVNEESTGSHHHHHH

SEQ ID NO: 1960 - protein, 114 aa, Artificial Sequence
  Description of Artificial Sequence: Synthetic polypeptide
GEPNLKVPGNVTAVLGETLKVPCHFPCKFSSYEKYWCKWNNTGCQALPSQDEGPSKAFVNCDENSRLVSLTLNLVTRADEGWYWCGVKQGHFYGETAAVYVAVEERGSHHHHHH

SEQ ID NO: 1961 - protein, 230 aa, Artificial Sequence
  Description of Artificial Sequence: Synthetic polypeptide
KSPIFGPEEVNSVEGNSVSITCYYPPTSVNRHTRKYWCRQGARGGCITLISSEGYVSSKYAGRANLTNFPENGTFVVNIAQLSQDDSGRYKCGLGINSRGLSFDVSLEVSQGPGLLNDTKVYTVDLGRTVTINCPFKTENAQKRKSLYKQIGLYPVLVIDSSGYVNPNYTGRIRLDIQGTGQLLFSVVINQLRLSDAGQYLCQAGDDSNSNKKNADLQVLKPGSHHHHHH

SEQ ID NO: 1962 - protein, 228 aa, Artificial Sequence
  Description of Artificial Sequence: Synthetic polypeptide
SQGPGLLNDTKVYTVDLGRTVTINCPFKTENAQKRKSLYKQIGLYPVLVIDSSGYVNPNYTGRIRLDIQGTGQLLFSVVINQLRLSDAGQYLCQAGDDSNSNKKNADLQVLKPEPELVYEDLRGSVTFHCALGPEVANVAKFLCRQSSGENCDVVVNTLGKRAPAFEGRILLNPQDKDGSFSVVITGLRKEDAGRYLCGAHSDGQLQEGSPIQAWQLFVNGSHHHHHH

SEQ ID NO: 1963 - protein, 224 aa, Artificial Sequence
  Description of Artificial Sequence: Synthetic polypeptide
STIPRSPTVVKGVAGSSVAVLCPYNRKESKSIKYWCLWEGAQNGRCPLLVDSEGWVKAQYEGRLSLLEEPGNGTFTVILNQLTSRDAGFYWCLTNGDTLWRTTVEIKIIEGEPNLKVPGNVTAVLGETLKVPCHFPCKFSSYEKYWCKWNNTGCQALPSQDEGPSKAFVNCDENSRLVSLTLNLVTRADEGWYWCGVKQGHFYGETAAVYVAVEERGSHHHHHH

SEQ ID NO: 1964 - protein, 31 aa, Homo sapiens
EKAVADTRDQADGSRASVDSGSSEEQGGSSR

SEQ ID NO: 1965 - protein, 33 aa, Mus musculus
EREIQNVGDQAQENRASGDAGSADGQSRSSSSK

SEQ ID NO: 1966 - protein, 33 aa, Mus musculus
EREIQNVRDQAQENRASGDAGSADGQSRSSSSK

SEQ ID NO: 1967 - protein, 100 aa, Artificial Sequence
  Description of Artificial Sequence: Synthetic polypeptide
  SITE (1)..(100): This sequence may encompass 1-20 "Glu Ala Ala Ala Lys" repeating units
EAAAKEAAAKEAAAKEAAAKEAAAKEAAAKEAAAKEAAAKEAAAKEAAAKEAAAKEAAAKEAAAKEAAAKEAAAKEAAAKEAAAKEAAAKEAAAKEAAAK

SEQ ID NO: 1968 - protein, 100 aa, Artificial Sequence
  Description of Artificial Sequence: Synthetic polypeptide
  SITE (1)..(100): This sequence may encompass 1-20 "Gly Gly Gly Gly Ser" repeating units
GGGGSGGGGSGGGGSGGGGSGGGGSGGGGSGGGGSGGGGSGGGGSGGGGSGGGGSGGGGSGGGGSGGGGSGGGGSGGGGSGGGGSGGGGSGGGGSGGGGS

SEQ ID NO: 1969 - protein, 80 aa, Artificial Sequence
  Description of Artificial Sequence: Synthetic polypeptide
  SITE (1)..(80): This sequence may encompass 1-20 "Gly Gly Gly Ser" repeating units
GGGSGGGSGGGSGGGSGGGSGGGSGGGSGGGSGGGSGGGSGGGSGGGSGGGSGGGSGGGSGGGSGGGSGGGSGGGSGGGS

SEQ ID NO: 1970 - protein, 15 aa, Artificial Sequence
  Description of Artificial Sequence: Synthetic peptide
EPKSCDKTHTCPPCP

SEQ ID NO: 1971 - protein, 12 aa, Artificial Sequence
  Description of Artificial Sequence: Synthetic peptide
ERKCCVECPPCP

SEQ ID NO: 1972 - protein, 62 aa, Artificial Sequence
  Description of Artificial Sequence: Synthetic polypeptide
ELKTPLGDTTHTCPRCPEPKSCDTPPPCPRCPEPKSCDTPPPCPRCPEPKSCDTPPPCPRCP

SEQ ID NO: 1973 - protein, 12 aa, Artificial Sequence
  Description of Artificial Sequence: Synthetic peptide
ESKYGPPCPSCP

SEQ ID NO: 1974 - protein, 7 aa, Artificial Sequence
  Description of Artificial Sequence: Synthetic peptide
GPQYASY

SEQ ID NO: 1975 - protein, 3 aa, Artificial Sequence
  Description of Artificial Sequence: Synthetic peptide
DAP

SEQ ID NO: 1976 - protein, 8 aa, Artificial Sequence
  Description of Artificial Sequence: Synthetic peptide
VGGVWSAD

SEQ ID NO: 1977 - protein, 633 aa, Artificial Sequence
  Description of Artificial Sequence: Synthetic polypeptide
KSPIFGPQEVSSIEGDSVSITCYYPDTSVNRHTRKYWCRQGASGMCTTLISSNGYLSKEYSGRANLINFPENNTFVINIEQLTQDDTGSYKCGLGTSNRGLSFDVSLEVSQVPELPSDTHVYTKDIGRNVTIECPFKRENAPSKKSLCKKTNQSCELVIDSTEKVNPSYIGRAKLFMKGTDLTVFYVNISHLTHNDAGLYICQAGEGPSADKKNVDLQVLAPEPELLYKDLRSSVTFECDLGREVANEAKYLCRMNKETCDVIINTLGKRDPDFEGRILITPKDDNGRFSVLITGLRKEDAGHYQCGAHSSGLPQEGWPIQTWQLFVNEESTIPNRRSVVKGVTGGSVAIACPYNPKESSSLKYWCRWEGDGNGHCPVLVGTQAQVQEEYEGRLALFDQPGNGTYTVILNQLTTEDAGFYWCLTNGDSRWRTTIELQVAEATREPNLEVTPQNATAVLGETFTVSCHYPCKFYSQEKYWCKWSNKGCHILPSHDEGARQSSVSCDQSSQLVSMTLNPVSKEDEGWYWCGVKQGQTYGETTAIYIAVEERTRGSSHVNPTDANARAKVALEEEVVDSSISEKENKAIPNPGPFANEREIQNVGDQAQENRASGDAGSADGQSRSSSSKHHHHHH

SEQ ID NO: 1978 - protein, 27 aa, Artificial Sequence
  Description of Artificial Sequence: Synthetic peptide
EPKTPKPQPQPQLQPQPNPTTESKSPK

SEQ ID NO: 1979 - DNA, 82 bp, Artificial Sequence
  Description of Artificial Sequence: Synthetic oligonucleotide
gaacccaagacaccaaaaccacaaccacaaccacaactacaaccacaacccaatcctacaacagaatccaagagccccaaaa

SEQ ID NO: 1980 - DNA, 657 bp, Homo sapiens
agcccagcacctgaactcctggggggaccgtcagtcttcctcttccccccaaaacccaaggacaccctcatgatctcccggacccctgaggtcacatgcgtggtggtggacgtgagccacgaagaccctgaggtcaagttcaactggtacgtggacggcgtggaggtgcataatgccaagacaaagccgcgggaggagcagtacaacagcacgtaccgtgtggtcagcgtcctcaccgtcctgcaccaggactggctgaatggcaaggagtacaagtgcaaggtctccaacaaagccctcccagcccccatcgagaaaaccatctccaaagccaaagggcagccccgagaaccacaggtgtacaccaagcccccatcccgggaggagatgaccaagaaccaggtcagcctgagctgcctggtcaaaggcttctatcccagcgacatcgccgtggagtgggagagcaatgggcagccggagaacaactacaagaccacggtgcccgtgctggactccgacggctccttcagactcgcaagctatctcaccgtggacaagagcagatggcagcaggggaacgtcttctcatgctccgtgatgcatgaggctctgcacaaccactacacgcagaagagcctctccctgtctccgggtaaa

SEQ ID NO: 1981 - protein, 219 aa, Homo sapiens
SPAPELLGGPSVFLFPPKPKDTLMISRTPEVTCVVVDVSHEDPEVKFNWYVDGVEVHNAKTKPREEQYNSTYRVVSVLTVLHQDWLNGKEYKCKVSNKALPAPIEKTISKAKGQPREPQVYTKPPSREEMTKNQVSLSCLVKGFYPSDIAVEWESNGQPENNYKTTVPVLDSDGSFRLASYLTVDKSRWQQGNVFSCSVMHEALHNHYTQKSLSLSPGK

SEQ ID NO: 1982 - protein, 6 aa, Artificial Sequence
  Description of Artificial Sequence: Synthetic 6xHis tag
HHHHHH
